United States Patent Application Publication US 2022/0403001 A1 - sequence listing, part 2

SEQ ID NO: 5119 - protein, 221 aa, Artificial Sequence
  source: /note="Description of Artificial Sequence: Synthetic light chain variable domain"
DIVMTQSPDSLAVSLGERATINCKSSQSLWDSGNQKNFLTWYQQKPGQPPKLLIYWTSYRESGVPDRFSGSGSGTDFTLTISSLQAEDVAVYYCQNDYFYPHTFGGGTKVEIKRGTVAAPSVFIFPPSDEQLKSGTASVVCLLNNFYPREAKVQWKVDNALQSGNSQESVTEQDSKDSTYSLSSTLTLSKADYEKHKVYACEVTHQGLSSPVTKSFNRGEC

SEQ ID NO: 5120 - protein, 113 aa, Artificial Sequence
  source: /note="Description of Artificial Sequence: Synthetic light chain variable domain"
EIVLTQSPATLSLSPGERATLSCKSSQSLLDSGNQKNFLTWYQQKPGQAPRLLIYWASTRESGVPSRFSGSGSGTEFTLTISSLQPDDFATYYCQNDYSYPYTFGQGTKVEIK

SEQ ID NO: 5121 - protein, 113 aa, Artificial Sequence
  source: /note="Description of Artificial Sequence: Synthetic light chain variable domain"
DIQMTQSPSSLSASVGDRVTITCKSSQSLLDSGNQKNFLTWYQQKPGQAPRLLIYWASTRESGIPPRFSGSGYGTDFTLTINNIESEDAAYYFCQNDYSYPYTFGQGTKVEIK

SEQ ID NO: 5122 - protein, 113 aa, Artificial Sequence
  source: /note="Description of Artificial Sequence: Synthetic light chain variable domain"
EIVLTQSPATLSLSPGERATLSCKSSQSLLDSGNQKNFLTWYQQKPGKAPKLLIYWASTRESGVPSRFSGSGSGTDFTFTISSLQPEDIATYYCQNDYSYPYTFGQGTKVEIK

SEQ ID NO: 5123 - protein, 113 aa, Artificial Sequence
  source: /note="Description of Artificial Sequence: Synthetic light chain variable domain"
DIVMTQTPLSLPVTPGEPASISCKSSQSLLDSGNQKNFLTWYQQKPGQAPRLLIYWASTRESGVPSRFSGSGSGTDFTFTISSLEAEDAATYYCQNDYSYPYTFGQGTKVEIK

SEQ ID NO: 5124 - protein, 113 aa, Artificial Sequence
  source: /note="Description of Artificial Sequence: Synthetic light chain variable domain"
EIVLTQSPATLSLSPGERATLSCKSSQSLLDSGNQKNFLTWYQQKPGKAPKLLIYWASTRESGVPSRFSGSGSGTDFTFTISSLEAEDAATYYCQNDYSYPYTFGQGTKVEIK

SEQ ID NO: 5125 - protein, 113 aa, Artificial Sequence
  source: /note="Description of Artificial Sequence: Synthetic light chain variable domain"
EIVLTQSPDFQSVTPKEKVTITCKSSQSLLDSGNQKNFLTWYQQKPGQAPRLLIYWASTRESGVPSRFSGSGSGTDFTFTISSLEAEDAATYYCQNDYSYPYTFGQGTKVEIK

SEQ ID NO: 5126 - protein, 113 aa, Artificial Sequence
  source: /note="Description of Artificial Sequence: Synthetic light chain variable domain"
DIVMTQSPDSLAVSLGERATINCKSSQSLWDSGNQKNFLTWYQQKPGQPPKLLIYWTSYRESGVPDRFSGSGSGTDFTLTISSLQAEDVAVYYCQNDYFYPLTFGGGTKVEIK

SEQ ID NO: 5127 - protein, 113 aa, Artificial Sequence
  source: /note="Description of Artificial Sequence: Synthetic light chain variable domain"
EIVLTQSPATLSLSPGERATLSCKSSQSLLDSGNQKNFLTWYQQKPGQAPRLLIYWASTRESGVPSRFSGSGSGTDFTFTISSLEAEDAATYYCQNDYSYPYTFGQGTKVEIK

SEQ ID NO: 5128 - protein, 113 aa, Artificial Sequence
  source: /note="Description of Artificial Sequence: Synthetic light chain variable domain"
DIQMTQSPSSLSASVGDRVTITCKSSQSLLDSGNQKNFLTWYLQKPGQSPQLLIYWASTRESGVPSRFSGSGSGTDFTFTISSLEAEDAATYYCQNDYSYPYTFGQGTKVEIK

SEQ ID NO: 5129 - protein, 113 aa, Artificial Sequence
  source: /note="Description of Artificial Sequence: Synthetic light chain variable domain"
DVVMTQSPLSLPVTLGQPASISCKSSQSLLDSGNQKNFLTWYQQKPGKAPKLLIYWASTRESGVPSRFSGSGSGTDFTFTISSLEAEDAATYYCQNDYSYPYTFGQGTKVEIK

SEQ ID NO: 5130 - protein, 113 aa, Artificial Sequence
  source: /note="Description of Artificial Sequence: Synthetic light chain variable domain"
DIVMTQSPDSLAVSLGERATINCKSSQSLWDSGNQKNFLTWYQQKPGQPPKLLIYWTSYRESGVPDRFSGSGSGTDFTLTISSLQAEDVAVYYCQNDYFYPHTFGGGTKVEIK

SEQ ID NO: 5131 - protein, 113 aa, Artificial Sequence
  source: /note="Description of Artificial Sequence: Synthetic light chain variable domain"
DIVMTQSPDSLAVSLGERATINCKSSQSLWDSTNQKNFLTWYQQKPGQPPKLLIYWTSTRESGVPDRFSGSGSGTDFTLTISSLQAEDVAVYYCQNDYFYPLTFGGGTKVEIK

SEQ ID NO: 5132 - protein, 214 aa, Artificial Sequence
  source: /note="Description of Artificial Sequence: Synthetic light chain variable domain"
EIVLTQSPATLSLSPGERATLSCRASQSVSSYLAWYQQKPGQAPRLLIYDASNRATGIPARFSGSGSGTDFTLTISSLEPEDFAVYYCQQSSNWPRTFGQGTKVEIKRTVAAPSVFIFPPSDEQLKSGTASVVCLLNNFYPREAKVQWKVDNALQSGNSQESVTEQDSKDSTYSLSSTLTLSKADYEKHKVYACEVTHQGLSSPVTKSFNRGEC

SEQ ID NO: 5133 - protein, 214 aa, Artificial Sequence; identical to SEQ ID NO: 5132
  source: /note="Description of Artificial Sequence: Synthetic light chain variable domain"

SEQ ID NO: 5134 - protein, 218 aa, Artificial Sequence
  source: /note="Description of Artificial Sequence: Synthetic light chain variable domain"
EIVLTQSPATLSLSPGERATLSCRASKGVSTSGYSYLHWYQQKPGQAPRLLIYLASYLESGVPARFSGSGSGTDFTLTISSLEPEDFAVYYCQHSRDLPLTFGGGTKVEIKRTVAAPSVFIFPPSDEQLKSGTASVVCLLNNFYPREAKVQWKVDNALQSGNSQESVTEQDSKDSTYSLSSTLTLSKADYEKHKVYACEVTHQGLSSPVTKSFNRGEC

SEQ ID NO: 5135 - protein, 218 aa, Artificial Sequence; identical to SEQ ID NO: 5134
  source: /note="Description of Artificial Sequence: Synthetic light chain variable domain"

SEQ ID NO: 5136 - protein, 219 aa, Artificial Sequence
  source: /note="Description of Artificial Sequence: Synthetic light chain variable domain"
DVVMTQSPLSLPVPLGQPASISCRSSQSLVDNDGNTYLNWFQQRPGQSPRRLIYKVSMRDSGVPDRFTGSGSGTDFTLRISRVEADDVGVYYCMQGTHWPLTFGPGTKVEIKRTVAAPSVFIFPPSDEQLKSGTASVVCLLNNFYPREAKVQWKVDNALQSGNSQESVTEQDSKDSTYSLSSTLTLSKADYEKHKVYACEVTHQGLSSPVTKSFNRGEC

SEQ ID NO: 5137 - protein, 107 aa, Artificial Sequence
  source: /note="Description of Artificial Sequence: Synthetic light chain variable domain"
DIVMTQTPLSLPVTPGEPASISCKASQDVGTAVAWYLQKPGQSPQLLIYWASTRHTGIPARFSGSGSGTEFTLTISSLQSEDFAVYYCQQYNSYPLTFGQGTKVEIK

SEQ ID NO: 5138 - protein, 107 aa, Artificial Sequence
  source: /note="Description of Artificial Sequence: Synthetic light chain variable domain"
DIQMTQSPSSLSASVGDRVTITCKASQDVGTAVAWYLQKPGQSPQLLIYWASTRHTGVPSRFSGSGSGTDFTLTISSLQPEDFATYYCQQYNSYPLTFGQGTKVEIK

SEQ ID NO: 5139 - protein, 214 aa, Artificial Sequence
  source: /note="Description of Artificial Sequence: Synthetic light chain variable domain"
DIQMTQSPSSLSASVGDRVTITCRASQDVSTAVAWYQQKPGKAPKLLIYSASFLYSGVPSRFSGSGSGTDFTLTISSLQPEDFATYYCQQYLYHPATFGQGTKVEIKRTVAAPSVFIFPPSDEQLKSGTASVVCLLNNFYPREAKVQWKVDNALQSGNSQESVTEQDSKDSTYSLSSTLTLSKADYEKHKVYACEVTHQGLSSPVTKSFNRGEC

SEQ ID NO: 5140 - protein, 107 aa, Artificial Sequence
  source: /note="Description of Artificial Sequence: Synthetic light chain variable domain"
EIVLTQSPDFQSVTPKEKVTITCKASQDVGTAVAWYLQKPGQSPQLLIYWASTRHTGVPDRFSGSGSGTDFTLKISRVEAEDVGVYYCQQYNSYPLTFGQGTKVEIK

SEQ ID NO: 5141 - protein, 107 aa, Artificial Sequence
  source: /note="Description of Artificial Sequence: Synthetic light chain variable domain"
EIVLTQSPDFQSVTPKEKVTITCKASQDVGTAVAWYLQKPGQSPQLLIYWASTRHTGVPSRFSGSGSGTDFTFTISSLQPEDIATYYCQQYNSYPLTFGQGTKVEIK

SEQ ID NO: 5142 - protein, 107 aa, Artificial Sequence
  source: /note="Description of Artificial Sequence: Synthetic light chain variable domain"
EIVLTQSPATLSLSPGERATLSCKASQDVGTAVAWYLQKPGQSPQLLIYWASTRHTGIPPRFSGSGYGTDFTLTINNIESEDAAYYFCQQYNSYPLTFGQGTKVEIK

SEQ ID NO: 5143 - protein, 107 aa, Artificial Sequence
  source: /note="Description of Artificial Sequence: Synthetic light chain variable domain"
DVVMTQSPLSLPVTLGQPASISCKASQDVGTAVAWYQQKPGQAPRLLIYWASTRHTGVPSRFSGSGSGTEFTLTISSLQPDDFATYYCQQYNSYPLTFGQGTKVEIK

SEQ ID NO: 5144 - protein, 108 aa, Artificial Sequence
  source: /note="Description of Artificial Sequence: Synthetic light chain variable domain"
DIQMTQSPSSLSASVGDRVTITCRASQDVSTAVAWYQQKPGKAPKLLIYSASFLYSGVPSRFSGSGSGTDFTLTISSLQPEDFATYYCQQYLYHPATFGQGTKVEIKR

SEQ ID NO: 5145 - protein, 107 aa, Artificial Sequence
  source: /note="Description of Artificial Sequence: Synthetic light chain variable domain"
DIQMTQSPSSLSASVGDRVTITCKASQDVGTAVAWYQQKPGQAPRLLIYWASTRHTGVPSRFSGSGSGTDFTFTISSLQPEDIATYYCQQYNSYPLTFGQGTKVEIK

SEQ ID NO: 5146 - protein, 122 aa, Artificial Sequence; identical to SEQ ID NO: 2651
  source: /note="Description of Artificial Sequence: Synthetic light chain variable domain"

SEQ ID NO: 5147 - protein, 107 aa, Artificial Sequence
  source: /note="Description of Artificial Sequence: Synthetic light chain variable domain"
AIQLTQSPSSLSASVGDRVTITCKASQDVGTAVAWYLQKPGQSPQLLIYWASTRHTGVPSRFSGSGSGTDFTFTISSLEAEDAATYYCQQYNSYPLTFGQGTKVEIK

SEQ ID NO: 5148 - protein, 107 aa, Artificial Sequence
  source: /note="Description of Artificial Sequence: Synthetic light chain variable domain"
EIVLTQSPDFQSVTPKEKVTITCKASQDVGTAVAWYQQKPGQAPRLLIYWASTRHTGVPSRFSGSGSGTEFTLTISSLQPDDFATYYCQQYNSYPLTFGQGTKVEIK

SEQ ID NO: 5149 - protein, 108 aa, Artificial Sequence; identical to SEQ ID NO: 5144
  source: /note="Description of Artificial Sequence: Synthetic light chain variable domain"

SEQ ID NO: 5150 - protein, 215 aa, Artificial Sequence
  source: /note="Description of Artificial Sequence: Synthetic light chain variable domain"
DIQMTQSPSSLSASVGDRVTITCRASQDVSTAVAWYQQKPGKAPKLLIYSASFLYSGVPSRFSGSGSGTDFTLTISSLQPEDFATYYCQQYLYHPATFCGQGTKVEIKRTVAAPSVFIFPPSDEQLKSGTASVVCLLNNFYPREAKVQWKVDNALQSGNSQESVTEQDSKDSTYSLSSTLTLSKADYEKHKVYACEVTHQGLSSPVTKSFNRGEC

SEQ ID NO: 5151 - protein, 107 aa, Artificial Sequence
  source: /note="Description of Artificial Sequence: Synthetic light chain variable domain"
DIMMTQSHKFMSTSVGDRVSITCKASQDVGTAVAWYQQKPGQSPKLLIYWASTRHTGVPDRFTGSGSGTDFTLTISNVQSEDLADYFCQQYNSYPLTFGQGTKVEIK

SEQ ID NO: 5152 - protein, 107 aa, Artificial Sequence; identical to SEQ ID NO: 5137
  source: /note="Description of Artificial Sequence: Synthetic light chain variable domain"

SEQ ID NO: 5153 - protein, 214 aa, Artificial Sequence
  source: /note="Description of Artificial Sequence: Synthetic light chain variable domain"
DIVMTQTPLSLPVTPGEPASISCKASQDVGTAVAWYLQKPGQSPQLLIYWASTRHTGIPARFSGSGSGTEFTLTISSLQSEDFAVYYCQQYNSYPLTFGQGTKVEIKRTVAAPSVFIFPPSDEQLKSGTASVVCLLNNFYPREAKVQWKVDNALQSGNSQESVTEQDSKDSTYSLSSTLTLSKADYEKHKVYACEVTHQGLSSPVTKSFNRGEC

SEQ ID NO: 5154 - protein, 107 aa, Artificial Sequence
  source: /note="Description of Artificial Sequence: Synthetic light chain variable domain"
DIVMTQSHKFMSTSVGDRVSITCKASQDVGTAVAWYQQKPGQSPKLLIYWASTRHTGVPDRFTGSGSGTDFTLTISNVQSEDLADYFCQQYSSYPLTFGAGSKLELK

SEQ ID NO: 5155 - protein, 107 aa, Artificial Sequence; identical to SEQ ID NO: 5138
  source: /note="Description of Artificial Sequence: Synthetic light chain variable domain"

SEQ ID NO: 5156 - protein, 214 aa, Artificial Sequence
  source: /note="Description of Artificial Sequence: Synthetic light chain variable domain"
DIQMTQSPSSLSASVGDRVTITCKASQDVGTAVAWYLQKPGQSPQLLIYWASTRHTGVPSRFSGSGSGTDFTLTISSLQPEDFATYYCQQYNSYPLTFGQGTKVEIKRTVAAPSVFIFPPSDEQLKSGTASVVCLLNNFYPREAKVQWKVDNALQSGNSQESVTEQDSKDSTYSLSSTLTLSKADYEKHKVYACEVTHQGLSSPVTKSFNRGEC

SEQ ID NO: 5157 - protein, 110 aa, Artificial Sequence
  source: /note="Description of Artificial Sequence: Synthetic light chain variable domain"
QSALTQPASVSGSPGQSITISCTGTSSDVGGYNYVSWYQQHPGKAPKLMIYDVSNRPSGVSNRFSGSKSGNTASLTISGLQAEDEADYYCSSYTSSSTRVFGTGTKVTVL

SEQ ID NO: 5158 - protein, 263 aa, Artificial Sequence [sequence omitted]

SEQ ID NO: 5159 - protein, 107 aa, Artificial Sequence
  source: /note="Description of Artificial Sequence: Synthetic light chain variable domain"
DIQMTQSPSSLSASVGDRVTITCRASQSISSYLNWYQQKPGKAPKLLIYAASSLQSGVPSRFSGSGSGTDFTLTISSLQPEDFATYYCQQYGRNPPTFGQGTKLEIK

SEQ ID NO: 5160 - protein, 107 aa, Artificial Sequence
  source: /note="Description of Artificial Sequence: Synthetic light chain variable domain"
DIQMTQSPSSLSASVGDRVTITCRASQSISSYLNWYQQKPGKAPKLLIYAASSLQSGVPSRFSGSGSGTDFTLTISSLQPEDFATYYCQQYGVYPFTFGQGTKLEIK

SEQ ID NO: 5161 - protein, 127 aa, Artificial Sequence
  source: /note="Description of Artificial Sequence: Synthetic light chain variable domain"
DIQMTQSPASLSASVGDTVTITCRASENIYSFLAWYHQKQGRSPQLLVYHAKTLAEGVPSRFSGSGSGTQFSLKINSLQAEDFGSYYCQHYYGSPLTFGAGTKLEVKRADAAPTVSIFPPSSEELSL

SEQ ID NO: 5162 - protein, 107 aa, Artificial Sequence; identical to SEQ ID NO: 5140
  source: /note="Description of Artificial Sequence: Synthetic light chain variable domain"

SEQ ID NO: 5163 - protein, 214 aa, Artificial Sequence
  source: /note="Description of Artificial Sequence: Synthetic light chain variable domain"
AIQLTQSPSSLSASVGDRVTITCRPSQGINWELAWYQQKPGKAPKLLIYDASSLEQGVPSRFSGSGSGTDFTLTISSLQPEDFATYYCQQFNSYPLTFGGGTKVEIKRTVAAPSVFIFPPSDEQLKSGTASVVCLLNNFYPREAKVQWKVDNALQSGNSQESVTEQDSKDSTYSLSSTLTLSKADYEKHKVYACEVTHQGLSSPVTKSFNRGEC

SEQ ID NO: 5164 - protein, 110 aa, Artificial Sequence
  source: /note="Description of Artificial Sequence: Synthetic light chain variable domain"
DIVLTQSPATLSLSPGERATLSCRASQFISSSYLSWYQQKPGQAPRLLIYGSSSRATGVPARFSGSGSGTDFTLTISSLEPEDFAVYYCQQLYSSPMTFGQGTKVEIKRT

SEQ ID NO: 5165 - protein, 215 aa, Artificial Sequence
  source: /note="Description of Artificial Sequence: Synthetic light chain variable domain"
DIVLTQSPATLSLSPGERATLSCRASQFISSSYLSWYQQKPGQAPRLLIYGSSSRATGVPARFSGSGSGTDFTLTISSLEPEDFAVYYCQQLYSSPMTFGQGTKVEIKRTVAAPSVFIFPPSDEQLKSGTASVVCLLNNFYPREAKVQWKVDNALQSGNSQESVTEQDSKDSTYSLSSTLTLSKADYEKHKVYACEVTHQGLSSPVTKSFNRGEC

SEQ ID NO: 5166 - protein, 214 aa, Artificial Sequence
  source: /note="Description of Artificial Sequence: Synthetic light chain variable domain"
EIVLTQSPDFQSVTPKEKVTITCKASQDVGTAVAWYLQKPGQSPQLLIYWASTRHTGVPDRFSGSGSGTDFTLKISRVEAEDVGVYYCQQYNSYPLTFGQGTKVEIKRTVAAPSVFIFPPSDEQLKSGTASVVCLLNNFYPREAKVQWKVDNALQSGNSQESVTEQDSKDSTYSLSSTLTLSKADYEKHKVYACEVTHQGLSSPVTKSFNRGEC

SEQ ID NO: 5167 - protein, 107 aa, Artificial Sequence; identical to SEQ ID NO: 5141
  source: /note="Description of Artificial Sequence: Synthetic light chain variable domain"

SEQ ID NO: 5168 - protein, 214 aa, Artificial Sequence
  source: /note="Description of Artificial Sequence: Synthetic light chain variable domain"
EIVLTQSPDFQSVTPKEKVTITCKASQDVGTAVAWYLQKPGQSPQLLIYWASTRHTGVPSRFSGSGSGTDFTFTISSLQPEDIATYYCQQYNSYPLTFGQGTKVEIKRTVAAPSVFIFPPSDEQLKSGTASVVCLLNNFYPREAKVQWKVDNALQSGNSQESVTEQDSKDSTYSLSSTLTLSKADYEKHKVYACEVTHQGLSSPVTKSFNRGEC

SEQ ID NO: 5169 - protein, 107 aa, Artificial Sequence; identical to SEQ ID NO: 5142
  source: /note="Description of Artificial Sequence: Synthetic light chain variable domain"

SEQ ID NO: 5170 - protein, 214 aa, Artificial Sequence
  source: /note="Description of Artificial Sequence: Synthetic light chain variable domain"
EIVLTQSPATLSLSPGERATLSCKASQDVGTAVAWYLQKPGQSPQLLIYWASTRHTGIPPRFSGSGYGTDFTLTINNIESEDAAYYFCQQYNSYPLTFGQGTKVEIKRTVAAPSVFIFPPSDEQLKSGTASVVCLLNNFYPREAKVQWKVDNALQSGNSQESVTEQDSKDSTYSLSSTLTLSKADYEKHKVYACEVTHQGLSSPVTKSFNRGEC

SEQ ID NO: 5171 - protein, 107 aa, Artificial Sequence; identical to SEQ ID NO: 5143
  source: /note="Description of Artificial Sequence: Synthetic light chain variable domain"

SEQ ID NO: 5172 - protein, 214 aa, Artificial Sequence
  source: /note="Description of Artificial Sequence: Synthetic light chain variable domain"
DVVMTQSPLSLPVTLGQPASISCKASQDVGTAVAWYQQKPGQAPRLLIYWASTRHTGVPSRFSGSGSGTEFTLTISSLQPDDFATYYCQQYNSYPLTFGQGTKVEIKRTVAAPSVFIFPPSDEQLKSGTASVVCLLNNFYPREAKVQWKVDNALQSGNSQESVTEQDSKDSTYSLSSTLTLSKADYEKHKVYACEVTHQGLSSPVTKSFNRGEC

SEQ ID NO: 5173 - protein, 107 aa, Artificial Sequence; identical to SEQ ID NO: 5145
  source: /note="Description of Artificial Sequence: Synthetic light chain variable domain"

SEQ ID NO: 5174 - protein, 214 aa, Artificial Sequence
  source: /note="Description of Artificial Sequence: Synthetic light chain variable domain"
DIQMTQSPSSLSASVGDRVTITCKASQDVGTAVAWYQQKPGQAPRLLIYWASTRHTGVPSRFSGSGSGTDFTFTISSLQPEDIATYYCQQYNSYPLTFGQGTKVEIKRTVAAPSVFIFPPSDEQLKSGTASVVCLLNNFYPREAKVQWKVDNALQSGNSQESVTEQDSKDSTYSLSSTLTLSKADYEKHKVYACEVTHQGLSSPVTKSFNRGEC

SEQ ID NO: 5175 - protein, 107 aa, Artificial Sequence
  source: /note="Description of Artificial Sequence: Synthetic light chain variable domain"
DIVMTQSHKFMSTSVGDRVSITCKASQDVGTAVAWYQQKPGQSPKLLIYWASTRHTGVPDRFTGSGSGTDFTLTISNVQSEDLADYFCQQYNSYPLTFGAGSKLELK

SEQ ID NO: 5176 - protein, 107 aa, Artificial Sequence; identical to SEQ ID NO: 5147
  source: /note="Description of Artificial Sequence: Synthetic light chain variable domain"

SEQ ID NO: 5177 - protein, 214 aa, Artificial Sequence
  source: /note="Description of Artificial Sequence: Synthetic light chain variable domain"
AIQLTQSPSSLSASVGDRVTITCKASQDVGTAVAWYLQKPGQSPQLLIYWASTRHTGVPSRFSGSGSGTDFTFTISSLEAEDAATYYCQQYNSYPLTFGQGTKVEIKRTVAAPSVFIFPPSDEQLKSGTASVVCLLNNFYPREAKVQWKVDNALQSGNSQESVTEQDSKDSTYSLSSTLTLSKADYEKHKVYACEVTHQGLSSPVTKSFNRGEC

SEQ ID NO: 5178 - protein, 107 aa, Artificial Sequence; identical to SEQ ID NO: 5148
  source: /note="Description of Artificial Sequence: Synthetic light chain variable domain"

SEQ ID NO: 5179 - protein, 214 aa, Artificial Sequence
  source: /note="Description of Artificial Sequence: Synthetic light chain variable domain"
EIVLTQSPDFQSVTPKEKVTITCKASQDVGTAVAWYQQKPGQAPRLLIYWASTRHTGVPSRFSGSGSGTEFTLTISSLQPDDFATYYCQQYNSYPLTFGQGTKVEIKRTVAAPSVFIFPPSDEQLKSGTASVVCLLNNFYPREAKVQWKVDNALQSGNSQESVTEQDSKDSTYSLSSTLTLSKADYEKHKVYACEVTHQGLSSPVTKSFNRGEC

SEQ ID NO: 5180 - protein, 114 aa, Artificial Sequence
  source: /note="Description of Artificial Sequence: Synthetic light chain variable domain"
QVQLVQSGAEVKKPGASVKVSCKASGYTFTGYTMHWVRQAPGQGLEWIGYINPRSGYTEYNQKFKDRTTITADKSTSTAYMELSSLRSEDTAVYYCARPWFAYWGQGTLVTVSS

SEQ ID NO: 5181 - protein, 113 aa, Artificial Sequence
  source: /note="Description of Artificial Sequence: Synthetic light chain variable domain"
DIVMTQSPASLTVTPGEKVTITCKSSQSLLNSGNQKNYLTWYQQKPGQPPKLLIYWASTRESGVPDRFTGSGSGTDFTLTISSLQAEDVAVYYCQNDYSYPLTFGQGTKLEIK

SEQ ID NO: 5182 - protein, 113 aa, Artificial Sequence
  source: /note="Description of Artificial Sequence: Synthetic light chain variable domain"
DIVMTQSPASLSVTPGEKVTITCKSSQSLLNSGNQKNYLTWYQQKPGQPPKLLIYWASTRESGVPDRFTGSGSGTDFTLTISSLQAEDVAVYYCQNDYSYPLTFGQGTKLEIK

SEQ ID NO: 5183 - protein, 113 aa, Artificial Sequence
  source: /note="Description of Artificial Sequence: Synthetic light chain variable domain"
DIVMTQSPAFLSVTPGEKVTITCKSSQSLLNSGNQKNYLTWYQQKPGQPPKLLIYWASTRESGVPDRFTGSGSGTDFTLTISSLQAEDVAVYYCQNDYSYPLTFGQGTKLEIK

SEQ ID NO: 5184 - protein, 113 aa, Artificial Sequence
  source: /note="Description of Artificial Sequence: Synthetic light chain variable domain"
DIVMTQSPAFLSVTPGEKVTITCKSSQSLLNSGNQKNYLTWYQQKPGQPPKLLIYWASTRESGVPDRFSGSGSGTDFTLTISSLQAEDVAVYYCQNDYSYPLTFGQGTKLEIK

SEQ ID NO: 5185 - protein, 110 aa, Artificial Sequence
  source: /note="Description of Artificial Sequence: Synthetic light chain variable domain"
QSALTQPASVSGSPGQTITISCNGTSSDVGGFDSVSWYQQSPGKAPKVMVFDVSHRPSGISNRFSGSKSGNTASLTISGLHIEDEGDYFCSSLTDRSHRIFGGGTKVTVL

SEQ ID NO: 5186 - protein, 110 aa, Artificial Sequence
  source: /note="Description of Artificial Sequence: Synthetic light chain variable domain"
QSALTQPASVSGSPGQSITISCNGTSNDVGGYESVSWYQQHPGKAPKVVIYDVSKRPSGVSNRFSGSKSGNTASLTISGLQAEDEGDYYCKSLTSTRRRVFGTGTKLTVL

SEQ ID NO: 5187 - protein, 112 aa, Artificial Sequence
  source: /note="Description of Artificial Sequence: Synthetic light chain variable domain"
DTVVTQSPLSLPVTPGEAASMSCSSTQSLRHSNGANYLAWYQHKPGQSPRLLIRLGSQRASGVPDRFSGSGSGTHFTLKISRVEAEDAAIYYCMQGLNRPWTFGKGTKLEIK

SEQ ID NO: 5188 - protein, 112 aa, Artificial Sequence
  source: /note="Description of Artificial Sequence: Synthetic light chain variable domain"
DTVVTQSPLSLPVTPGEAASMSCTSTQSLRHSNGANYLAWYQHKPGQSPRLLIRLGSQRASGVPDRFSGSGSGTHFTLKISRVEPEDAAIYYCMQGLNRPWTFGKGTKLEIK

SEQ ID NO: 5189 - protein, 112 aa, Artificial Sequence
  source: /note="Description of Artificial Sequence: Synthetic light chain variable domain"
DTVVTQSPLSLSVTPGEAASMSCTSTQSLRHSNGANYLAWYQHKPGQSPRLLIRLGSQRASGVPDRFSGSGSGTHFTLKISRVEADDAAIYYCMQGLNRPWTFGKGTKLEIK

SEQ ID NO: 5190 - protein, 112 aa, Artificial Sequence
  source: /note="Description of Artificial Sequence: Synthetic light chain variable domain"
EVVITQSPLFLPVTPGEAASLSCKCSHSLQHSTGANYLAWYLQRPGQTPRLLIHLATHRASGVPDRFSGSGSGTDFTLKISRVESDDVGTYYCMQGLHSPWTFGQGTKVEIK

SEQ ID NO: 5191 - protein, 117 aa, Artificial Sequence
  source: /note="Description of Artificial Sequence: Synthetic light chain variable domain"
QVQLVQSGAEVRKPGASVKVSCKASGGTFSSYAISWVRQAPGQGLEWMGRIIPILGIANYAQKFQGRVTITADKSTSTAYMELSSLRSEDTAVYYCARHYGQWWDYWGQGTLVTVSS

SEQ ID NO: 5192 - protein, 116 aa, Artificial Sequence
  source: /note="Description of Artificial Sequence: Synthetic light chain variable domain"
QVQLVQSGAEVKKPGSSVKVSCKASGGTFSSHPISWVRQAPGQGLEWMGRIIPMLDIPNNAQKFQGRVTITADKSTDTAYLELSSLTSEDTAVYYCARGLYYYDYWGQGTLVTVSS

SEQ ID NO: 5193 - protein, 116 aa, Artificial Sequence
  source: /note="Description of Artificial Sequence: Synthetic light chain variable domain"
EVQLVESGAEVKKPGSSVKVSCKASGGTFSSYAISWVRQAPGQGLEWMGRIIPIFGIANYAQKFQGRVTITADKSTSTAYMELSSLRSEDTAVYYCARSMWYMDSWGQGTLVTVSS

SEQ ID NO: 5194 - protein, 118 aa, Artificial Sequence
  source: /note="Description of Artificial Sequence: Synthetic light chain variable domain"
QVQLVQSGAEVKKPGASVKVSCKASGYTFSSYGISWVRQAPGQGLEWMGWISPYNGNTNYAQNLQGRVTMTTDTSTTTAYMELRSLTSDDTAVYYCARYSGYYYVDYWGQGTLVTVSS

SEQ ID NO: 5195 - protein, 119 aa, Artificial Sequence
  source: /note="Description of Artificial Sequence: Synthetic light chain variable domain"
EVQLVESGAEVKKPGSSVKVSCKASGGTFSSYAISWVRQAPGQGLEWMGRIIPILGIANYAQKFQGRVTITADKSTSTAYMELSSLRSEDTAVYYCARQGYVWSEMDFWGQGTLVTVSS

SEQ ID NO: 5196 - protein, 117 aa, Artificial Sequence
  source: /note="Description of Artificial Sequence: Synthetic light chain variable domain"
EVQLVESGAEVKKPGASVKVSCKASGYTFTSYYMHWVRQAPGQGLEWMGIINPSGGSTSYAQKFQGRVTMTRDTSTSTVYMELSSLRSEDTAVYYCAAGSYYSLDIWGQGTMVTVSS

SEQ ID NO: 5197 - protein, 117 aa, Artificial Sequence
  source: /note="Description of Artificial Sequence: Synthetic light chain variable domain"
EVQLVQSGAEVEKPGASVKVSCKASGYTFSSYYMDWVRQAPGQGLEWMGRINPTSGSTTYAQKFQGRVTMTRDTSTFTVYMDLSSLRSEDTAVYYCARSGGGYGDSWGQGTLVTVSS

SEQ ID NO: 5198 - protein, 216 aa, Artificial Sequence
  source: /note="Description of Artificial Sequence: Synthetic light chain variable domain"
EIVLTQSPIIIVISASPGEKVTMTCSASSSVSYMEIWYQQRTNGSPRRWIYDTSKLASGVPARFSGSGSGTSYSLTISSMEAEDIADYFCHQWRSNPYTFGGGTKLEIKRADAAPTVSIFPPSSEQLTSGGASVVCFLNNFYPKEINVKWKIDGSERQNGVLNSWTDQDSKDSTYSMSSTLTLTKDEYERHNSYTCEATHKTSTSPIVKSFNRNEC

SEQ ID NO: 5199 - protein, 215 aa, Artificial Sequence
  source: /note="Description of Artificial Sequence: Synthetic light chain variable domain"
EIVLTQSPIIIVISASPGEKVTMTCSASSSVSYMHWYQQRTNGSPRRWIYDTSKLASGVPARFSGSGSGTSYSLTISSMEAEDEADYFCHQWRSNPYTFGGGTKLEIKRADAAPTVSIFPPSSEQLTSGGASVVCFLNNFYPKEINVKWKIDGSERQNGVLNSWTDQDSKDSTYSMSSTLTLTKDEYERHNSYTCEATHKTSTSPIVKSFNRNEC

SEQ ID NO: 5200 - protein, 115 aa, Artificial Sequence
  source: /note="Description of Artificial Sequence: Synthetic light chain variable domain"
DIVMTQSHKFMSTSVGDRVSIICKASQDVGTAVDWYQQKPGQSPKLLIYWASTRHTGVPDRFTGSGSGTDFTLTITNVQSEDLADYFCQQYNSYPLTFGAGTMLDLKRAAARSDP

SEQ ID NO: 5201 - protein, 64 aa, Artificial Sequence
  source: /note="Description of Artificial Sequence: Synthetic light chain variable domain"
DIVLTQSPASLAVSLGQRATISCRASESVDSFGNSFMHWYQQKPGQPPKLLIYAASNLGSGVPA

SEQ ID NO: 5202 - protein, 108 aa, Artificial Sequence
  source: /note="Description of Artificial Sequence: Synthetic light chain variable domain"
DIVMTQSQKFMSTSVGDRVNVTCKASQNVGTNVVWYQQKTGQSPKALIHSASYRYSGVPDRFTGSGSGTDFTLTLSNVQSEDLAEYFCQHYNSFPYTFGGGTKLEIKR

SEQ ID NO: 5203 - protein, 94 aa, Artificial Sequence
  source: /note="Description of Artificial Sequence: Synthetic light chain variable domain"
LGGRVTITCKASDHINNWLAWYQQKPGNAPRLLISGATTLETGVPSRFSGSGSGKDYTLSITSLQTEDVATYYCQQYWSIPYTFGGGTKLEIKR

SEQ ID NO: 5204 - protein, 108 aa, Artificial Sequence
  source: /note="Description of Artificial Sequence: Synthetic light chain variable domain"
DIVLTQSPATLSVTPGDSVSLSCRASQSVSNNLHWYQQKSHASPRLLIKYASQSISGIPSRFSGSGSGTDFTLSINSVETEDFGMYFCQQSYSWPRTFGGGTKLEIKR

SEQ ID NO: 5205 - protein, 114 aa, Artificial Sequence
  source: /note="Description of Artificial Sequence: Synthetic light chain variable domain"
DIVMTQSPSSLSVSAGEKVTMSCKSSQSLLNGGNQQNSLAWYQQKPGQPPKLLIYGASTRESGVPDRFTGSGSGTDFALTISSVQAEDLAVYYCQNDHTYPYTFGGGTELEIKR

SEQ ID NO: 5206 - protein, 116 aa, Artificial Sequence
  source: /note="Description of Artificial Sequence: Synthetic light chain variable domain"
DIQMTQSPASLSASVGETVTITCRTSENIYSYLAWYQQKQLAWYQQKQGKSPQLLVHNANTLAEGVPSRFSGSGSGTQFSLRINSLQPEDFGSYYCQHHYGIPFTFGGGTKLEVER

SEQ ID NO: 5207 - protein, 111 aa, Artificial Sequence
  source: /note="Description of Artificial Sequence: Synthetic light chain variable domain"
DIVLTQSPASLAVSLGQRATVFCRASQTVDYNGMSYMHWFQQKPGQPPKLLIYAASNLDSGIPARFSGSGSGTDFTLNIHPVEEEDAATYYCQQCIEDPLTFGAGTMLEVK

SEQ ID NO: 5208 - protein, 107 aa, Artificial Sequence
  source: /note="Description of Artificial Sequence: Synthetic light chain variable domain"
DIQMTQSPASLSVSVGETVTITCRASENIYSNLAWYQQKQGKSPQLLVNAATNLADGVSSRFRGSGSGTQYSLKINSLQSEDFGSYYCQHFWITPFTFGSGTKLERK

SEQ ID NO: 5209 - protein, 111 aa, Artificial Sequence
  source: /note="Description of Artificial Sequence: Synthetic light chain variable domain"
DIVLTQSPASLAVSLGQRATISCRASESVDNYGISFMHWFQQKPGQPPKLLIYAASNLGSGVPARFSGSGSGTDFSLNIHPLEEADTAMYFCQQSKEVPRTFGGGTKLEIK

SEQ ID NO: 5210 - protein, 108 aa, Artificial Sequence
  source: /note="Description of Artificial Sequence: Synthetic light chain variable domain"
SIVLTQSLKFLLVSAGDRVTMTCKASQSVTNDVAWYQQKPGQSPKLLIYYASKHYTGVPDRFTGSGYGTDFTFTISTVQAEDLAVYFCQQDYSSPYTFGGGTKLEIKR

SEQ ID NO: 5211 - protein, 111 aa, Artificial Sequence
  source: /note="Description of Artificial Sequence: Synthetic light chain variable domain"
DIVLTQSPASLAVSLGQRATISCRASQSVSTSTSIYMHWYQQKPGQPPKLLIKYASNLESGVPARFSGSGSGTEITLNIHPVEEEDTATYYCQHSWEIPWTFGGGTKLEIK

SEQ ID NO: 5212 - protein, 114 aa, Artificial Sequence
  source: /note="Description of Artificial Sequence: Synthetic light chain variable domain"
DIVMTQSPSSLSVSAGEKVTMSCKSSQSLLNSGNPKNYLAWYQQKPGQPPKLLIYGASTRGSGVPDRFTGSGSGTDFTLTISSVQAEDLAVYYCQNDHTFPYTFGGGTKLEIKR

SEQ ID NO: 5213 - protein, 107 aa, Artificial Sequence
  source: /note="Description of Artificial Sequence: Synthetic light chain variable domain"
DIQMTQTPSSLSASLGDRVTINCRASQGLSNYLNWYQQKPDGTVKLLIYYASILHSGVPSRFTGSGSGTDYSLTISTLEQEDIGTYFCQQGNTLPWTFGGGTKLEIK

SEQ ID NO: 5214 - protein, 113 aa, Artificial Sequence
  source: /note="Description of Artificial Sequence: Synthetic light chain variable domain"
DIVMSQSPSSLAVSVGEKVTLSCKSSQSLLYSSTQNNYLAWYQQTPGQSPKLLIYWASTRESGVPDRFTGSGSGTDFTLTISSVKAEDLAVYYCQQYYSYPWTFGGGTKLEIK

SEQ ID NO: 5215 - protein, 107 aa, Artificial Sequence
  source: /note="Description of Artificial Sequence: Synthetic light chain variable domain"
DIKMTQSPSSMYASLGERVTITCKASQDIYPYLNWFQQKPGKSPKTLIYRTNRLLDGVPSRFSGSGSGQDYSLTISSLDYEDMGIYYCLQYDEFPLTFGAGTKLELK

SEQ ID NO: 5216 - protein, 111 aa, Artificial Sequence
  source: /note="Description of Artificial Sequence: Synthetic light chain variable domain"
DIVLTQSPASLAVSLGQRATISCRASESVDSYGKSFMHWYQQRPGQPPKLLIYRASNLESGIPARFSGSGSRTDFTLTINPVEADDVATYYCQQSNEDPWTFGGGTKLEIK

SEQ ID NO: 5217 - protein, 111 aa, Artificial Sequence
  source: /note="Description of Artificial Sequence: Synthetic light chain variable domain"
DIALTQSPASLAVSLGQRATISCRASESVDNSGICFVNWFQQKPGQPPKLLIYAASNQGSGVPARFSGSGSGTDFSLNIHPMEKDDTAMYFCQQSKEVPWTFGGGTKLEIK

SEQ ID NO: 5218 - protein, 111 aa, Artificial Sequence
  source: /note="Description of Artificial Sequence: Synthetic light chain variable domain"
DIVLTQSPASLTVSLGQRATISCRASQSVSTSTFNYMNWYQQKLGQPPKLLIKYASNLESGVPARFSGSGSGTDFTLNIHPVEEEDIATYYCQHSWEIPWTFGGGTKLEIK

SEQ ID NO: 5219 - protein, 113 aa, Artificial Sequence
  source: /note="Description of Artificial Sequence: Synthetic light chain variable domain"
DIVLTQATPSVPVTPGESVSISCRSSKSLLHTKGDTYLYWFLQRPGQSPQLLIYRMSNLASGVPDRFSGSGSGTVFTLRISRVEAEDVGVYYCMQHLEYPFTFGSGTKLEIKR

SEQ ID NO: 5220 - protein, 107 aa, Artificial Sequence
  source: /note="Description of Artificial Sequence: Synthetic light chain variable domain"
ETTVTQSPASLSMAIGEKVTIRCITNTDIDDDMNWYQQKPGEPPKLLISEGNGLRPGVPSRFSSSGYGTDFVFTIENMLSEDVADYYCLQSDNLPLTFGSGTKLEIK

SEQ ID NO: 5221 - protein, 113 aa, Artificial Sequence
  source: /note="Description of Artificial Sequence: Synthetic light chain variable domain"
DIVMTQSPSSLTVTAGVKVTMSCKSSQSLLNSGDQKNCLTWYQQKPGQPPKLLIYWASTRESGVPDRFTGSGSGTDFTLTISSVQAEDLAVYYCQNDYSYPLTFGAGTKLELK

SEQ ID NO: 5222 - protein, 103 aa, Artificial Sequence
  source: /note="Description of Artificial Sequence: Synthetic light chain variable domain"
DIQMTQSPSSLSASVGDRVTITCKASQDIYPYLNWFQQKPGKAPKTLIYRTNRLLDGVPSRFSGSGSGTDFTFTISSLQPYYCLQYDEFPLTFGAGTKLEIKR

SEQ ID NO: 5223 - protein, 112 aa, Artificial Sequence
  source: /note="Description of Artificial Sequence: Synthetic light chain variable domain"
EIVLTQSPATLSLSPGERATLSCRASESVDSYGKSFMHWYQQKPGQAPRLLIYRASNLESGIPARFSGSGSGTDFTLTISSLEPEDFAVYYCQQSNEDPWTFGGGTKLEIKR

SEQ ID NO: 5224 - protein, 113 aa, Artificial Sequence
  source: /note="Description of Artificial Sequence: Synthetic light chain variable domain"
DIVMTQSPLSLPVTPGEPASISCRSSKSLLHTKGDTYLYWFLQKPGQSPQLLIYRMSNRASGVPDRFSGSGSGTDFTLKISRVEAEDVGVYYCMQHLEYPFTFGQGTKLEIKR

SEQ ID NO: 5225 - protein, 108 aa, Artificial Sequence
  source: /note="Description of Artificial Sequence: Synthetic light chain variable domain"
ETTLTQSPAFMSATPGDKVNISCITNTDIDDDMNWYQQKPGEAAILLISEGNGLRPGIPPRFSGSGYGTDFTLTINNIESEDAAYYFCLQSDNLPLTFGSGTKLEIKR

SEQ ID NO: 5226 - protein, 107 aa, Artificial Sequence
  source: /note="Description of Artificial Sequence: Synthetic light chain variable domain"
DIQMTQSPSSLSASVGDRVTITCKASQDIYPYLNWFQQKPGKAPKTLIYRTNRLLDGVPSRFSGSGSGTDFTFTISSLQPEDIATYYCLQYDEFPLTFGAGTKLEIK

SEQ ID NO: 5227 - protein, 111 aa, Artificial Sequence
  source: /note="Description of Artificial Sequence: Synthetic light chain variable domain"
EIVLTQSPATLSLSPGERATLSCRASESVDSYGKSFMHWYQQKPGQAPRLLIYRASNLESGIPARFSGSGSGTDFTLTISSLEPEDFAVYYCQQSNEDPWTFGGGTKLEIK

SEQ ID NO: 5228 - protein, 107 aa, Artificial Sequence
  source: /note="Description of Artificial Sequence: Synthetic light chain variable domain"
ETTLTQSPAFMSATPGDKVNISCITNTDIDDDMNWYQQKPGEAAILLISEGNGLRPGIPPRFSGSGYGTDFTLTINNIESEDAAYYFCLQSDNLPLTFGSGTKLEIK

SEQ ID NO: 5229 - protein, 112 aa, Artificial Sequence
  source: /note="Description of Artificial Sequence: Synthetic light chain variable domain"
QSVLTQPPSVSGAPGQRVTISCTGSSSNIGAGYDVHWYQQLPGTAPKLLIYGNSNRPSGVPDRFSGSKSGTSASLAITGLQAEDEADYYCQSYDSSLSGSVFGTGTKVTVLG

SEQ ID NO: 5230 - protein, 111 aa, Artificial Sequence
  source: /note="Description of Artificial Sequence: Synthetic light chain variable domain"
QSVVTQPPSVSAAPGQKVTISCSGSSSNIENNYVSWYQQLPGTAPKLLIYDNNKRPSGIPDRFSGSKSGTSATLGITGLQTGDEADYYCGTWDSSLSAYVFGTGTKVTVLG

SEQ ID NO: 5231 - protein, 111 aa, Artificial Sequence
  source: /note="Description of Artificial Sequence: Synthetic light chain variable domain"
QSVVTQPPSVSAAPGQKVTISCSGSSSNIGNNYVSWYQQLPRTAPRLLIYDNNKRPSGIPDRFSASKSGTSATLGITGLQTGDEADYYCGTWDSSLSAVVFGGGTKLTVLG

SEQ ID NO: 5232 - protein, 108 aa, Artificial Sequence
  source: /note="Description of Artificial Sequence: Synthetic light chain variable domain"
DIQMTQSPSSLSASVGDRVTITCQASQDISNYLNWYQQKPGKAPKLLIYDASNLETGVPSRFSGSGSGTDFTFTISSLQPDDFATYYCQQYKSYPLTFGGGTKVEIKR

SEQ ID NO: 5233 - protein, 112 aa, Artificial Sequence
  source: /note="Description of Artificial Sequence: Synthetic light chain variable domain"
QSVVTQPPSVSGAPGQRVTISCTGSSSNIGAGYDVHWYQQLPGTAPKLLIYGNINRPSGVPDRFSGSKSGTSASLAITGLQAEDEADYYCQSYDSNLSGYVFATGTKVTVLG

SEQ ID NO: 5234 - protein, 112 aa, Artificial Sequence
  source: /note="Description of Artificial Sequence: Synthetic light chain variable domain"
QSVLTQPPSVSGAPGQRVTISCTGSSSNIGAGYDVHWYQQLPGTAPKLLIYGNSNRPSGVPDRFSGSKSGTSASLAITGLQAEDEADYYCQSYDSSLSGYVFGTGTKVTVLG

SEQ ID NO: 5235 - protein, 108 aa, Artificial Sequence
  source: /note="Description of Artificial Sequence: Synthetic light chain variable domain"
DIQMTQTTSSLSASLGDRVTISCRASQDISNYLNWYQQKPDGTVKLLIYYTSRLHSGVPSRFSGSGSGTDYSLTISNLEQEDIATYFCQQGNTLPRTFGGGTKLEIKR

SEQ ID NO: 5236 - protein, 213 aa, Artificial Sequence
  source: /note="Description of Artificial Sequence: Synthetic light chain variable domain"
QIVLSQSPIILSASPGEKVTMTCRASSSVSYIHWFQQRTNGSPRPWIYATSNLASGVPVRFSGSGSGTSYSLTISRVEAEDIADYYCQQWTSNPPTFGGGTKLEIKRTVAAPSVFIFPPSDEQLKSGTASVVCLLNNFYPREAKVQWKVDNALQSGNSQESVTEQDSKDSTYSLSSTLTLSKADYEKHKVYACEVTHQGLSSPVTKSFNRGEC

SEQ ID NO: 5237 - protein, 213 aa, Artificial Sequence
  source: /note="Description of Artificial Sequence: Synthetic light chain variable domain"
QIVLSQSPIILSASPGEKVTMTCRASSSVSYIHWFQQRTNGSPRPWIYATSNLASGVPVRFSGSGSGTSYSLTISRVEAEDEADYYCQQWTSNPPTFGGGTKLEIKRTVAAPSVFIFPPSDEQLKSGTASVVCLLNNFYPREAKVQWKVDNALQSGNSQESVTEQDSKDSTYSLSSTLTLSKADYEKHKVYACEVTHQGLSSPVTKSFNRGEC

SEQ ID NO: 5238 - protein, 107 aa, Artificial Sequence
  source: /note="Description of Artificial Sequence: Synthetic light chain variable domain"
DIVMTQSQKIMSTTVGDRVSITCKASQNVDAAVAWYQQKPGQSPKLLIYSASNRYTGVPDRFTGSGSGTDFTLTISNMQSEDLADYFCQQYDIYPYTFGGGTKLEIK

SEQ ID NO: 5239 - protein, 107 aa, Artificial Sequence
  source: /note="Description of Artificial Sequence: Synthetic light chain variable domain"
DIKMTQSPSSMYASLGERVTITCKASPDINSYLSWFQQKPGKSPKTLIYRANRLVDGVPSRFSGGGSGQDYSLTINSLEYEDMGIYYCLQYDEFPYTFGGGTKLEMK

SEQ ID NO: 5240 - protein, 106 aa, Artificial Sequence
  source: /note="Description of Artificial Sequence: Synthetic light chain variable domain"
EIVLSQSPAITAASLGQKVTITCSASSNVSYIHWYQQRSGTSPRPWIYEISKLASGVPVRFSGSGSGTSYSLTISSMEAEDAAIYYCQQWNYPLITFGSGTKLEIQ

SEQ ID NO: 5241 - protein, 107 aa, Artificial Sequence
  source: /note="Description of Artificial Sequence: Synthetic light chain variable domain"
DIKMTQSPSSMYASVGERVTITCKASQGINSYSGWFQQKPGKSPKTLIYRGNRLVDGVPSRFSGSGSGQDYSLTISSLEYEDMGIYYCLQYDEFPYTFGGGTKLEIK

SEQ ID NO: 5242 - protein, 107 aa, Artificial Sequence
  source: /note="Description of Artificial Sequence: Synthetic light chain variable domain"
DIKMTQSPSSMYASLGERVTITCKASQDINSYLSWFQQKPGKSPKTLIYRANRLVDGVPSRFSGSGSGQDYSLTISSLEYEDMGIYYCLQYDEFPYTFGGGTKLEIK

SEQ ID NO: 5243 - protein, 107 aa, Artificial Sequence
  source: /note="Description of Artificial Sequence: Synthetic light chain variable domain"
MEIEITQTPALMSASPGEKVTMTCSASSSVSYMYWYQQKPRSSPKPWIYLTSNLASGVPARFSGSGSGTSYSLTISSMEAEDAATYYCQQWSSNPYTFGGGTRLELK

SEQ ID NO: 5244 - protein, 108 aa, Artificial Sequence
  source: /note="Description of Artificial Sequence: Synthetic light chain variable domain"
MEVLITQTPSSLSASLGERVSLTCRASQDIGSSLNWLQQEPDGTIKRLIYATSSLDSGVPKRFSGSRSGSDYSLTISSLESEDFVDYYCLQYASSPYTFGGGTKLELK

SEQ ID NO: 5245 - protein, 106 aa, Artificial Sequence
  source: /note="Description of Artificial Sequence: Synthetic light chain variable domain"
  MOD_RES (5)..(5): Any amino acid
  MOD_RES (24)..(24): Any amino acid
  MOD_RES (39)..(39): Any amino acid
  MOD_RES (55)..(55): Any amino acid
  MOD_RES (79)..(79): Any amino acid
  MOD_RES (84)..(84): Any amino acid
EIVLXQSPATLSLSPGERATLSCXASSNVSYIHWYQQKXGQAPRPWIYEISKLAXGIPARFSGSGSGTDYTLTISSLEXEDFAXYYCQQWNYPLITFGQGTKLEIK

SEQ ID NO: 5246 - protein, 107 aa, Artificial Sequence
  source: /note="Description of Artificial Sequence: Synthetic light chain variable domain"
  MOD_RES (3)..(3): Any amino acid
  MOD_RES (55)..(55): Any amino acid
  MOD_RES (80)..(80): Any amino acid
DIXMTQSPSSLSASVGDRVTITCRASQDINSYLSWFQQKPGKAPKTLIYRANRLXSGVPSRFSGSGSGQDYTLTISSLQXEDFATYYCLQYDEFPYTFGQGTKLEIK

SEQ ID NO: 5247 - protein, 107 aa, Artificial Sequence
  source: /note="Description of Artificial Sequence: Synthetic light chain variable domain"
DIKMTQSPSSMYASLGERVTITCKASPDINSYLSWFQQKPGKSPKTLIYRANRLVDGVPSRFSGGGSGQDYSLTLNSLEYEDMGIYYCLQYDEFPYTFGGGTKLEMK

SEQ ID NO: 5248 - protein, 108 aa, Artificial Sequence
  source: /note="Description of Artificial Sequence: Synthetic light chain variable domain"
DIQMTQTTSSLSASLGDRVTITCRASQDINNYLNWYQQKPDGTVKLLIYYTSALHSGVPSRFSGSGSGTDYSLTISNLEQEDIATYFCQQGNTLPPYTFGGGTKLEIK

SEQ ID NO: 5249 - protein, 107 aa, Artificial Sequence; identical to SEQ ID NO: 5242
  source: /note="Description of Artificial Sequence: Synthetic light chain variable domain"

SEQ ID NO: 5250 - protein, 107 aa, Artificial Sequence; identical to SEQ ID NO: 5238
  source: /note="Description of Artificial Sequence: Synthetic light chain variable domain"

SEQ ID NO: 5251 - protein, 107 aa, Artificial Sequence; identical to SEQ ID NO: 5239
  source: /note="Description of Artificial Sequence: Synthetic light chain variable domain"

SEQ ID NO: 5252 - protein, 106 aa, Artificial Sequence; identical to SEQ ID NO: 5240
  source: /note="Description of Artificial Sequence: Synthetic light chain variable domain"

SEQ ID NO: 5253 - protein, 107 aa, Artificial Sequence
  source: /note="Description of Artificial Sequence: Synthetic light chain variable domain"
DIVMTQTPLSLPVTPGEPASISCRASKSISKYLAWYQQKPGQAPRLLIYSGSTLQSGIPPRFSGSGYGTDFTLTINNIESEDAAYYFCQQHDESPYTFGEGTKVEIK

SEQ ID NO: 5254 - protein, 107 aa, Artificial Sequence
  source: /note="Description of Artificial Sequence: Synthetic light chain variable domain"
DVVMTQSPLSLPVTLGQPASISCRASKSISKYLAWYQQKPGKAPKLLIYSGSTLQSGIPPRFSGSGYGTDFTLTINNIESEDAAYYFCQQHDESPYTFGEGTKVEIK

SEQ ID NO: 5255 - protein, 112 aa, Artificial Sequence
  source: /note="Description of Artificial Sequence: Synthetic light chain variable domain"
  MOD_RES (86)..(86): Any amino acid
  MOD_RES (89)..(89): Any amino acid
  MOD_RES (92)..(92): Any amino acid
SYELTQPPSVSVSPGQTASITCSGDKLGDKYACWYQQKPGQSPVLVIYQDSKRPSGIPERFSGSNSGNTATLTISGTQAMDEADYXAAXAAXAAAWDSSTVVFGGGTKLTVL

SEQ ID NO: 5256 - protein, 110 aa, Artificial Sequence
  source: /note="Description of Artificial Sequence: Synthetic light chain variable domain"
  MOD_RES (86)..(86): Any amino acid
  MOD_RES (89)..(89): Any amino acid
SYELTQPPSVSVSPGQTASITCSGDKLGDKYACWYQQKPGQSPVLVIYQDSKRPSGIPERFSGSNSGNTATLTISGTQAMDEADYXAAXAAQAWDSSTVVFGGGTKLTVL

SEQ ID NO: 5257 - protein, 120 aa, Artificial Sequence
  source: /note="Description of Artificial Sequence: Synthetic light chain variable domain"
  MOD_RES (65)..(65): Any amino acid
  MOD_RES (87)..(87): Any amino acid
  MOD_RES (96)..(96): Any amino acid
  MOD_RES (99)..(99): Any amino acid
  MOD_RES (102)..(102): Any amino acid
  MOD_RES (105)..(105): Any amino acid
QSVLTQPPSVSVAPGQTARITCGGNNIGTKSVHWYQQKPGQAPVLVLYDESDRPSGIPERFSGSXAASGNTATLTISRVEAGDEADXAALLSGVGXAAXAAXAAXAASLCFGSGTKLTVL

SEQ ID NO: 5258 - protein, 112 aa, Artificial Sequence
  source: /note="Description of Artificial Sequence: Synthetic light chain variable domain"
  MOD_RES (65)..(65): Any amino acid
  MOD_RES (87)..(87): Any amino acid
QSVLTQPPSVSVAPGQTARITCGGNNIGTKSVHWYQQKPGQAPVLVLYDESDRPSGIPERFSGSXAASGNTATLTISRVEAGDEADXAALLQVWDSSSDHYVFGSGTKLTVL

SEQ ID NO: 5259 - protein, 88 aa, Artificial Sequence
  source: /note="Description of Artificial Sequence: Synthetic light chain variable domain"
EIVMTQSPSFLSASVGDRVTITCRASQGISSYLAWYQQKPGKAPKLLIYAASTLQSGSHQGFSGSGSGTEFTLTISSLQPEDFATYYC

SEQ ID NO: 5260 - protein, 106 aa, Artificial Sequence
  source: /note="Description of Artificial Sequence: Synthetic light chain variable domain"
VLTQPPSVSVAPGKTARITCGGNNLGSKNVHWYQQKPGQAPVLVIYDDDNRPSGIPERFSGSNSGNTATLTISRVEAGDEADYYCQVWDSSSRHVVFGGGTKLTVL

SEQ ID NO: 5261 - protein, 110 aa, Artificial Sequence
  source: /note="Description of Artificial Sequence: Synthetic light chain variable domain"
QPVLTQPHSVSESPGKTVTISCTRSSGNIASNFVQWYQRRPDGATTNVIYEDTQRPSGVSGRFSGSIDRSSNSASLTISGLRAEDEADYYCQSYDGRNLMFGGGTKVTVL

SEQ ID NO: 5262 - protein, 110 aa, Artificial Sequence
  source: /note="Description of Artificial Sequence: Synthetic light chain variable domain"
QPVLTQPHSVSESPGKTVTISCTRSSGSIASNYVQWYQQRPGSAPTTVIYEDNQRPSGVPDRFSGSIDSSSNSASLTISGLKTEDEADYYCQSYDSSNHVFGTGTKLTVL

SEQ ID NO: 5263 - protein, 107 aa, Artificial Sequence
  source: /note="Description of Artificial Sequence: Synthetic light chain variable domain"
NIQMTQSPSSLSASVGDRVTITCRASQSINKWLAWYQQKPGKAPKLLIHDASTLESGVPSRFSGSGSGTEFTLTISSLHPDDSATYYCQQLKSPPAQFGEGTKLEIK

SEQ ID NO: 5264 - protein, 107 aa, Artificial Sequence
  source: /note="Description of Artificial Sequence: Synthetic light chain variable domain"
NIQMTQSPSSLSASVGDRVTITCRASQSINKWLAWYQQKPGKAPKLLIHDASTLESGVPSRFSGSGSGTEFTLTISSLHPDDSATYYCQQLKSRPLSFGEGTKLEIK

SEQ ID NO: 5265 - protein, 110 aa, Artificial Sequence
  source: /note="Description of Artificial Sequence: Synthetic light chain variable domain"
QSVLTQPSSVSGTPGQRVTISCSGSSSNIGSNYVYWYQQLPGTAPKLLIYRNNQRPSGVPDRFSGSKSGTSASLGHQWAPGPRMRLIITAAWDDSLSGVVFGGGTKLTVL

SEQ ID NO: 5266 - protein, 108 aa, Artificial Sequence
  source: /note="Description of Artificial Sequence: Synthetic light chain variable domain"
QSVLTQPPSVSVAPGQTARITCGGNNIGSTSVHWFQQKPGQAPVLVVYDDSDRPSGIPERFSGSNSGNTATLTISRVEAGDEADYYCQVWDNDSDHRVFGGGTKLTVL

SEQ ID NO: 5267 - protein, 110 aa, Artificial Sequence
  source: /note="Description of Artificial Sequence: Synthetic light chain variable domain"
QSVLTQPPSVPGTPGQRVTITCSGSRFNIGSNTVNWYQQLPGTAPKLLIYSNNQRPSGVPDRFSGSKSGTSASLAISGLQSEDEADYYCAAWDDSLNGYVFGTGTKLTVL

SEQ ID NO: 5268 - protein, 109 aa, Artificial Sequence
  source: /note="Description of Artificial Sequence: Synthetic light chain variable domain"
  MOD_RES (69)..(69): Any amino acid
QSVLTQPPSVSVAPGQTARITCGGNRIGTKAVHWYQQKSGQAPVLVVRDDTDRPSGSLRDSLAPTLGTXAAATLTISGVEAGDEADYYQVWDSSSDHRVFGGGTKLTVL

SEQ ID NO: 5269 - protein, 111 aa, Artificial Sequence
  source: /note="Description of Artificial Sequence: Synthetic light chain variable domain"
ELVLTQSPSVSAALGSPAKITCTLSSAHKTDTIDWYQQLQGEAPRYLMQVQSDGSYTKRPGVPDRFSGSSSGADRYLIIPSVQADDEADYYCGADYIGGYVFGGGTQLTVT

SEQ ID NO: 5270 - protein, 111 aa, Artificial Sequence
  source: /note="Description of Artificial Sequence: Synthetic light chain variable domain"
QSALTQPPSASGTPGQRVTISCPGSSSNIGSNYVYWYQQLPGTAPKLLIYRNNQRPSGVPDRFSGSKSGTSATLGITGLQTGDEADYYCGTWDSSLSAYVFGTGTKVTVLG

SEQ ID NO: 5271 - protein, 112 aa, Artificial Sequence
  source: /note="Description of Artificial Sequence: Synthetic light chain variable domain"
QSALTQPASVSGSPGQSITISCTGTSSDVGGYNYVSWYQQHPGKAPKLMIYDVSNRPSGVSNRFSGSKSGNTASLTISGLQAEDEADYYCSSYTSSSIPWVFGGGTKLTVLG

SEQ ID NO: 5272 - protein, 111 aa, Artificial Sequence
  source: /note="Description of Artificial Sequence: Synthetic light chain variable domain"
QSALTQPASVSGSPGQSITISCTGTSRDVGGYDYVSWYQQYPGNAPKLMIYDVSRRPSGVSHRFSASKSGNTASLTISGLQTEDEADYYCSSYTSSSTRVFGGGTKVTVLG

SEQ ID NO: 5273 - protein, 112 aa, Artificial Sequence
  source: /note="Description of Artificial Sequence: Synthetic light chain variable domain"
QSALTQPASVSGSPGQSITISCTGTSSDVGGYNYVSWYQQHPGKAPKLMIYDVSKRPSGVSNRFSGSKSGNTASLTISGLQAEDEADYYCSSYTSSSTSVVFGGGTKLTVLG

SEQ ID NO: 5274 - protein, 111 aa, Artificial Sequence
  source: /note="Description of Artificial Sequence: Synthetic light chain variable domain"
QSVLTQPASVSGSPGQSITISCTGTTSDVGGYNYVSWYQQHPGKAPKLMIYDVSKRPSGVSNRFSGSKSGNTASLTISGLQAEDEADYYCSSYTSSSTDVFGTGTKLTVLG

SEQ ID NO: 5275 - protein, 108 aa, Artificial Sequence
  source: /note="Description of Artificial Sequence: Synthetic light chain variable domain"
DIQMTQSPSSLSASVGDRVTITCQASQDISNYLNWYQQKPGKAPKLLIYDASNLETGVPSRFSGSGSGTDFTFTISSLQPEDIATYYCQQYDNLPLTFGGGTKLEIKR

SEQ ID NO: 5276 - protein, 111 aa, Artificial Sequence
  source: /note="Description of Artificial Sequence: Synthetic light chain variable domain"
QSALTQPASVSASPGQSITISCTGTSSDVGGYNYVTWYQQHPGKAPKLMIYDVSKRPSGVLDRFSGSKSGNTASLTISGLQAEDEADYFCSSYTSSSTLVFGGGTKLTVLG

SEQ ID NO: 5277 - protein, 111 aa, Artificial Sequence
  source: /note="Description of Artificial Sequence: Synthetic light chain variable domain"
QSALTQPPSASGTPGQRVTISCSGSSSNIGSNYVYWYQQLPGTAPKLLIYRNNQRPSGVPDRFSGSKSGTSASLAISGLRSEDEADYYCAAWDDSLSGYVFGTGTKVTVLG

SEQ ID NO: 5278 - protein, 111 aa, Artificial Sequence
  source: /note="Description of Artificial Sequence: Synthetic light chain variable domain"
QSVLTQPPSASGAPGQRVTISCSGGISNVGTNGVNWYQHLPGTAPKLLVDAMNQRPSGVPDRFSGSRSGTSGSLAITGLRSEDEADYYCATWDDSLSGVLFGGGTKLTVLG

SEQ ID NO: 5279 - protein, 108 aa, Artificial Sequence
  source: /note="Description of Artificial Sequence: Synthetic light chain variable domain"
DIQMTQSPSSLSASVGDRVTITCQASQDIRNYLNWYQQKPGKAPKLLIYAASNLETGVPSRFSGSGSGTDFTFTISSLQPEDIATYYCQQDDNLPLTFGGGTKLEIKR

SEQ ID NO: 5280 - protein, 108 aa, Artificial Sequence
  source: /note="Description of Artificial Sequence: Synthetic light chain variable domain"
DIVMTQSPSSLSASVGDRVTITCQASQDISNYLNWYQQKPGKAPKLLIYDASNLETGVPSRFSGSGSGTDFIFTISSLQPEDIATYYCQQFDNLPYTFGQGTKVEIKR

SEQ ID NO: 5281 - protein, 106 aa, Artificial Sequence
  source: /note="Description of Artificial Sequence: Synthetic light chain variable domain"
EIVLTQSPGTLSLSPGERATLSCRASQSVSSSYLAWYQQKPGQAPRLLIYGASSRATGIPDRFSGSGSGTDFTLTISRLEPEDFAVYYCQQYGSLFGQGTKVEIKR

SEQ ID NO: 5282 - protein, 106 aa, Artificial Sequence
  source: /note="Description of Artificial Sequence: Synthetic light chain variable domain"
EIVLTQSPGTLSLSPGERATLSCRASQSVSSSYLAWYQQKPGQAPRLLIYGASSRATGIPDRFSGSGSGTDFTLTISRLEPEDFAVYYCQQYGSSFGPGTKVDIKR

SEQ ID NO: 5283 - protein, 108 aa, Artificial Sequence
  source: /note="Description of Artificial Sequence: Synthetic light chain variable domain"
DIQLTQSPSSLSASVGDRVTITCRASQNINNYLNWYQQKPGKAPKLLLYAASSLQSGVPSRFSGSGSGTEFTLTISSLHPEDFATYYCQQSYNTPFTFGPGTKVDIKR

SEQ ID NO: 5284 - protein, 109 aa, Artificial Sequence
  source: /note="Description of Artificial Sequence: Synthetic light chain variable domain"
DIQLTQSPSSLSASVGDRVTITCRASQSISSYLNWYQQKPGKAPKLLIYAASSLQSGVPSRFSGSGSGTDFTLTISSLQPEDFATYYCQQSYSTPPWTFGQGTKVEIKR

SEQ ID NO: 5285 - protein, 111 aa, Artificial Sequence
  source: /note="Description of Artificial Sequence: Synthetic light chain variable domain"
QSALTQPASVSGSPGQSITISCTGTSSDFGDYDYVSWYQQHPGKAPKLMIYDVSDRPSGVSNRFSGSKSGNTASLTISGLQAEDEADYFCSSFTTSSTLVFGGGTKLTVLG

SEQ ID NO: 5286 - protein, 108 aa, Artificial Sequence
  source: /note="Description of Artificial Sequence: Synthetic light chain variable domain"
AIRMTQSPSSLSASVGDRVTITCQASQDISNYLNWYQQKPGKAPKLLIYAASSLQSGVPSRFSGSGSGTDFTLTISSLQPEDFATYYCQQSYSTPFTFGPGTKVDIKR

SEQ ID NO: 5287 - protein, 111 aa, Artificial Sequence
  source: /note="Description of Artificial Sequence: Synthetic light chain variable domain"
QSVLTQPASVSGSPGQSITISCTGTSSDFGDYDYVSWYQQHPGKAPKLMIYDVSDRPSGVSNRFSGSKSGNTASLTISGLQAEDEADYFCSSLTTSSTLVFGGGTKLTVLG

SEQ ID NO: 5288 - protein, 108 aa, Artificial Sequence
  source: /note="Description of Artificial Sequence: Synthetic light chain variable domain"
AIQMTQSPSSLSASVGDRVTITCRTSQSISSYLNWYQQKPGKAPKLLIYAASSLQSGVPSRFSGSGSGTDFTLTISSLQPEDFATYYCQQSYSTPFTFGPGTKVDIKR

SEQ ID NO: 5289 - protein, 111 aa, Artificial Sequence
  source: /note="Description of Artificial Sequence: Synthetic light chain variable domain"
QSVLTQPPSVSGTPGQRVTIFCSGGSNNIGRSSVYWYRQAAGTAPKLLIYKTDQRPSGVPDRFAASKSGASASLAISGLRSEDEADYHCATWDDSLSAVVFGGGTKLTVLG

SEQ ID NO: 5290 - protein, 116 aa, Artificial Sequence
  source: /note="Description of Artificial Sequence: Synthetic light chain variable domain"
QSALTQPALTQPASVSGSPGQSITISCTGTSSDFGDYDYVSWYQQHPGKAPKLMIYDVSDRPSGVSNRFSGSKSGNTASLTISGLQAEDEADYFCSSFTTSSTLVFGGGTKLTVLG

SEQ ID NO: 5291 - protein, 112 aa, Artificial Sequence
  source: /note="Description of Artificial Sequence: Synthetic light chain variable domain"
NFMLTQPRSVSESPGKTVTISCTGNGGRVANNYVQWYQQRPGSAPTTVIYEDNQRPSGVPARFSGSIDSSSNSASLTISGLKTDDEADYYCQSYDISNQRVFGGGTKLTVLG

SEQ ID NO: 5292 - protein, 107 aa, Artificial Sequence
  source: /note="Description of Artificial Sequence: Synthetic light chain variable domain"
DIQMTQSPSSVSASVGDRVTITCRASQGISTLLAWYQQKPGKAPKLLISSASSLQSGVPARFSGSGSGTDFTLTISSLQPEDFATYYCQQSYRAPTFGQGTKVEIKR

SEQ ID NO: 5293 - protein, 108 aa, Artificial Sequence
  source: /note="Description of Artificial Sequence: Synthetic light chain variable domain"
ETTLTQSPAFMSATPGDKVNISCKASQDIDDDLNWYQQKPGEAPILIIQEATTLVPGIPPRFSGSGFGTDFTLTINSMQSEDVAYYFCLQHDNFPPTFGQGTKVEIKR

SEQ ID NO: 5294 - protein, 108 aa, Artificial Sequence
  source: /note="Description of Artificial Sequence: Synthetic light chain variable domain"
DIQLAQSPSSLSASVGDRVTITCRASQSISNYLNWYQQKPGKAPKLLIYAASSLQSGVPSRFSGSGSGTDFTLTISSLQPEDFATYYCQQSYSTPFTFGPGTKVEIKR

SEQ ID NO: 5295 - protein, 111 aa, Artificial Sequence
  source: /note="Description of Artificial Sequence: Synthetic light chain variable domain"
QSVVTQPPSVSAAPGQKVTISCSGSSSNIGKNYVSWYQQFPGTAPKLLIYDNNERPSGIPARFSGSKSGTSATLGITGLQTGDEADYYCATFDTSLWAAVFGGGTKLTVLG

SEQ ID NO: 5296 - protein, 110 aa, Artificial Sequence
  source: /note="Description of Artificial Sequence: Synthetic light chain variable domain"
QSALTQPASVSGSPGQSITISCTGTSSDVGGYNYVSWYQQHPGKAPKLLIYEVSQRPSGVPDRFSGSKSGNTASLTVSGLQAEDEADYYCSSYAGDRDVFGTGTQLTVLS

SEQ ID NO: 5297 - protein, 108 aa, Artificial Sequence
  source: /note="Description of Artificial Sequence: Synthetic light chain variable domain"
DIQMTQSPSSVSASVGDRVTITCRASQGISSWLAWYQQKPGKAPKLLIYAASSLQSGVPSRFSGSGSGTDFTLTISSLQPEDFATYYCQQANSFPLTFGGGTKVEIKR

SEQ ID NO: 5298 - protein, 111 aa, Artificial Sequence
  source: /note="Description of Artificial Sequence: Synthetic light chain variable domain"
QSALTQPASVSGSPGQSITLSCTGTSSDVGGYNYVSWYQQHPGNGPKLIIYDVTKRPSGVSNRFSGSKSGNTAYLTISGLQAEDEADYYCASYTRSTTLVFGGGTKLTVLG

SEQ ID NO: 5299 - protein, 110 aa, Artificial Sequence
  source: /note="Description of Artificial Sequence: Synthetic light chain variable domain"
QSALTQPASVSGSPGQSITISCTGTSSDVGGYNYVSWYQQHPGKAPKLMIYDVSKRPSGVSNRFSGSKSGNTASLTISGLQAEDEADYYCSSYTGRSTVFGGGTKLTVLG

SEQ ID NO: 5300 - protein, 111 aa, Artificial Sequence
  source: /note="Description of Artificial Sequence: Synthetic light chain variable domain"
QSALTQPASVSGSPGQSITISCTGTSSDVGGYNYVSWYQQHPGKAPKLMIYDVSNRPSGVSNRFSGSKSGNTASLTISGLQAEDEADYYCSSYTSSSTRVFGGGTKLTVLG

SEQ ID NO: 5301 - protein, 112 aa, Artificial Sequence
  source: /note="Description of Artificial Sequence: Synthetic light chain variable domain"
QSVLTQPPSVSGAPGQRVTISCTGSSSNIGAGYDVHWYQQLPGTAPKLLIYGNSNRPSGVPDRFSGSKSGTSASLAITGLQAEDEADYYCQSYDSSLSGYVFGTGTKLTVLG

SEQ ID NO: 5302 - protein, 110 aa, Artificial Sequence
  source: /note="Description of Artificial Sequence: Synthetic light chain variable domain"
CSSELTQDPAVSVALGQTVRITCQGDSLRSYYASWYQQKPGQAPVLVIYGKNNRPSGIPDRFSGSSSGNTASLTITGAQAEDEADYYCNSRDSSGNHLVFGGGTKLTVLG

SEQ ID NO: 5303 - protein, 111 aa, Artificial Sequence
  source: /note="Description of Artificial Sequence: Synthetic light chain variable domain"
QSVLTQPPSASGTPGQRVTISCSGSSSNIGSNTVNWYQQLPGTAPKLLIYSNNQRPSGVPDRFSGSKSGTSASLAIRGLQSDDEAEYYCAAWDDSLKSFVFGKGTKVTVLG

SEQ ID NO: 5304 - protein, 111 aa, Artificial Sequence
  source: /note="Description of Artificial Sequence: Synthetic light chain variable domain"
QSALTQPPSASGTPGQRVTISCSGSSSNIGSNYVYWYQQLPGTAPKLLIYRNNQRPSGVPDRFSGSKSGTSASLAISGLRSEDEADYYCAAWDDSLSAWVFGGGTKLTVLG

SEQ ID NO: 5305 - protein, 108 aa, Artificial Sequence
  source: /note="Description of Artificial Sequence: Synthetic light chain variable domain"
AIQMTQSPSSLSASVGDRVTITCRASQSISSHLNWYQQKPGKAPKLLIYAASSLQSGVPSRFSGSGSGTDFTLTISSLQPEDFATYYCQQSYSTPFTFGPGTKVDIKR

SEQ ID NO: 5306 - protein, 108 aa, Artificial Sequence
  source: /note="Description of Artificial Sequence: Synthetic light chain variable domain"
DIQLTQSPSSLSASVGDRVTITCQASQDVRNYLNWYQQKPGKAPNLLIYDATNLESGVPSRFSGSGSGTDFTFTISSLQPEDFATYYCQQYDNLPLSFGGGTKVEIKR

SEQ ID NO: 5307 - protein, 109 aa, Artificial Sequence
  source: /note="Description of Artificial Sequence: Synthetic light chain variable domain"
EIVLTQSPDTLSLSPGERATLSCRASQSVSSNLAWYQQKPGQAPRLLIYGASTRATGIPARFSGSGSGTEFTLTISSLQSEDFAVYYCQQYNNWPPYTFGQGTKVEIKR

SEQ ID NO: 5308 - protein, 109 aa, Artificial Sequence
  source: /note="Description of Artificial Sequence: Synthetic light chain variable domain"
EIVMTQSPATLSVSPGERATLSCRASQSVSSNLAWYQQKPGQAPRLLIYGASTRATGIPARFSGSGSGTEFTLTISSLQSEDFAVYYCQQYNNWPPYTFGQGTKVEIKR

SEQ ID NO: 5309 - protein, 108 aa, Artificial Sequence
  source: /note="Description of Artificial Sequence: Synthetic light chain variable domain"
AIRMTQSPSSLSASVGDRVTITCQASQDISNYLNWYQQKPGKAPKLLIYDASNLETGVPSRFSGSGSGTDFTFTISSLQPEDIATYYCQQYDNLPLTFGGGTKVEIKR

SEQ ID NO: 5310 - protein, 109 aa, Artificial Sequence
  source: /note="Description of Artificial Sequence: Synthetic light chain variable domain"
QSVLTQPPSVSVAPGETARITCGGTNIGSESVHWYQQRPGQAPVLVVYDDTDRPSGIPERFSGSNSGNTATLTISRVEAGDGADYYCQVWDSVSDRYVFGTGTKVTVLG

SEQ ID NO: 5311 - protein, 112 aa, Artificial Sequence
  source: /note="Description of Artificial Sequence: Synthetic light chain variable domain"
QSVLTQPASVSGSPGQSITISCTGTSSDVGGYNYVSWYQQHPGKAPKLMIYDVSNRPSGVSNRFSGSKSGNTASLTISGLQAEDEADYYCSSYTSSSTLWVFGGGTKLTVLG

SEQ ID NO: 5312 - protein, 111 aa, Artificial Sequence
  source: /note="Description of Artificial Sequence: Synthetic light chain variable domain"
QSALTQPASVSGSPGQSITISCTGTSSDVGGYNYVSWYQQHPGKAPKFMIYDVSKRPSGVSNRFSGSKSGNTASLTISGLQAEDEADYYCGSFTSSITYVFGTGTKVTVLG

SEQ ID NO: 5313 - protein, 110 aa, Artificial Sequence
  source: /note="Description of Artificial Sequence: Synthetic light chain variable domain"
QSALTQPASVSGSPGQSITISCTGTSSDVGGYNYVSWYQQHPGKAPKLMIFDVSNRPSGVSNRFSGSKSGNTASLTISGLQAEDEADYYCSSYTSSSTLFGGGTKLTVLG

SEQ ID NO: 5314 - protein, 111 aa, Artificial Sequence
  source: /note="Description of Artificial Sequence: Synthetic light chain variable domain"
DIVMTQSPDSLAVSLGERATINCKASQSVDYDGDSYMNWYQQKPGQPPKLLIYAASNLESGVPDRFSGSGSGTDFTLTISSLQAEDVAVYYCQQSNEDPYTFGQGTKLEIK

SEQ ID NO: 5315 - protein, 111 aa, Artificial Sequence
  source: /note="Description of Artificial Sequence: Synthetic light chain variable domain"
DIVMTQSPASLAVSLGQRATISCKASQSVDYDGDSYMNWYQQKPGQPPKLLIYAASNLESGIPARFSGSGSGTDFTLNIHPVEEEDAATYYCQQSNEDPYTFGGGTKLEIK

SEQ ID NO: 5316 - protein, 107 aa, Artificial Sequence
  source: /note="Description of Artificial Sequence: Synthetic light chain variable domain"
DIQMTQSPSSLSASLGDTITITCHASQNINVWLSWYQQKPGNIPKLLIYKASNLHTGVPSRFSGSGSGTGFTLTISSLQPEDIATYYCQQGQSYPYTFGGGTKLEIK

SEQ ID NO: 5317 - protein, 220 aa, Artificial Sequence
  source: /note="Description of Artificial Sequence: Synthetic light chain variable domain"
DIQMTQSPILLSASVGDRVTITCKSSQSLLYSGNQKNYLAWYQQRTNGSPRLLIYWASARESGVPSRFSGSRSGTDFTLTISSLQPEDEADYYCQQYYSYPLTFGAGTKVEIKRTVAAPSVFIFPPSDEQLKSGTASVVCLLNNFYPREAKVQWKVDNALQSGNSQESVTEQDSKDSTYSLSSTLTLSKADYEKHKVYACEVTHQGLSSPVTKSFNRGEC

SEQ ID NO: 5318 - protein, 106 aa, Artificial Sequence
  source: /note="Description of Artificial Sequence: Synthetic light chain variable domain"
EIVLTQSPATLSLSPGERATLSCSATSSVSYMHWYQQKPGKAPKRWIYDTSKLASGVPSRFSGSGSGTEFTLTISSLQPEDFATYYCQQWSSNPLTFGQGTKLEIK

SEQ ID NO: 5319 - protein, 107 aa, Artificial Sequence [sequence omitted]

SEQ ID NO: 5320 - protein, 108 aa, Artificial Sequence
  source: /note="Description of Artificial Sequence: Synthetic light chain variable domain"
DIQMTQSPSSLSASVGDRVTIACRASQTISRYLNWYQQKPGKAPKLLIYAASSLQSGVSSRFSGSGSGTEFTLTISSLQPEDFATYFCQQTYSPPITFGQGTRLEIKR

SEQ ID NO: 5321 - protein, 108 aa, Artificial Sequence
  source: /note="Description of Artificial Sequence: Synthetic light chain variable domain"
DIQLTQSPSSLSASVGDRVTITCRASRAISRYLNWYQQKPGKAPKLLIYAASSLQSGVSSRFSGSGSGTEFTLTISSLQPEDFATYFCQQTYSPPITFGQGTRLEIKR

SEQ ID NO: 5322 - protein, 450 aa, Artificial Sequence
  source: /note="Description of Artificial Sequence: Synthetic light chain variable domain"
EVQLLESGGGLVQPGGSLRLSCAASGFTFSMYGMVWVRQAPGKGLEWVSVISPSGGNTGYADSVKGRFTISRDNSKNTLYLQMNSLRAEDTAVYYCARAPRGYSYGYYYWGQGTLVTVSSASTKGPSVFPLAPSSKSTSGGTAALGCLVKDYFPEPVTVSWNSGALTSGVHTFPAVLQSSGLYSLSSVVTVPSSSLGTQTYICNVNHKPSNTKVDKRVEPKSCDKTHTCPPCPAPELLGGPSVFLFPPKPKDTLMISRTPEVTCVVVDVSHEDPEVKFNWYVDGVEVHNAKTKPREEQYNSTYRVVSVLTVLHQDWLNGKEYKCKVSNKALPAPIEKTISKAKGQPREPQVYTLPPSREEMTKNQVSLTCLVKGFYPSDIAVEWESNGQPENNYKTTPPVLDSDGSFFLYSKLTVDKSRWQQGNVFSCSVMHEALHNHYTQKSLSLSPGK

SEQ ID NO: 5323 - protein, 107 aa, Artificial Sequence
  source: /note="Description of Artificial Sequence: Synthetic light chain variable domain"
DIQMTQSPSSLSASVGDRVTITCRASEHIYSYLSWYQQKPGKAPKLLIYNAKTLAEGVPSRFSGSGSGTDFTLTISSLQPEDFATYYCQHHFGSPLTFGQGTRLEIK

SEQ ID NO: 5324 - protein, 107 aa, Artificial Sequence
  source: /note="Description of Artificial Sequence: Synthetic light chain variable domain"
DIQMTQSPSSLSASVGDRVTITCRASEHIYSYLSWYQQKPGKAPKLLIYNAKTLAEGVPSRFSGSGSGTQFTLTISSLQPEDFATYYCQHHFGSPLTFGQGTRLEIK

SEQ ID NO: 5325 - protein, 107 aa, Artificial Sequence
  source: /note="Description of Artificial Sequence: Synthetic light chain variable domain"
DIQMTQSPSSLSASVGDRVTITCRASEHIYSYLSWYQQKPGKVPKLLIYNAKTLAEGVPSRFSGSGSGTDFTLTISSLQPEDVATYYCQHHFGSPLTFGQGTRLEIK

SEQ ID NO: 5326 - protein, 107 aa, Artificial Sequence
  source: /note="Description of Artificial Sequence: Synthetic light chain variable domain"
DIQMTQSPSSLSASVGDRVTITCRASEHIYSYLSWYQQKPGKVPKLLIYNAKTLAEGVPSRFSGSGSGTQFTLTISSLQPEDVATYYCQHHFGSPLTFGQGTRLEIK

SEQ ID NO: 5327 - protein, 106 aa, Artificial Sequence
  source: /note="Description of Artificial Sequence: Synthetic light chain variable domain"
DIQMTQSPSLLSASVGDRVTLNCIASQNIYKSLAWYQLKLGEAPKLLIYNANSLQAGIPSRFSGSGSGTDFALTISGLQPEDVATYFCQQYSGGYTFGAGTKLELK

SEQ ID NO: 5328 - protein, 106 aa, Artificial Sequence
  source: /note="Description of Artificial Sequence: Synthetic light chain variable domain"
NIVMAQSPKSMSISAGDRVTMNCKASQNVDNNIAWYQQKPGQSPKLLIFYASNRYSGVPDRFTGGGYGTDFTLTIKSVQAEDAAFYYCQRIYNFPTFGSGTKLEIK

SEQ ID NO: 5329 - protein, 106 aa, Artificial Sequence
  source: /note="Description of Artificial Sequence: Synthetic light chain variable domain"
  MOD_RES (10)..(10): Any amino acid
  MOD_RES (21)..(22): Any amino acid
  MOD_RES (40)..(40): Any amino acid
  MOD_RES (42)..(43): Any amino acid
  MOD_RES (46)..(46): Any amino acid
  MOD_RES (52)..(53): Any amino acid
  MOD_RES (58)..(58): Any amino acid
  MOD_RES (77)..(77): Any amino acid
  MOD_RES (83)..(83): Any amino acid
  MOD_RES (87)..(87): Any amino acid
  MOD_RES (95)..(95): Any amino acid
  MOD_RES (105)..(105): Any amino acid
DIQMTQSPSXLSASVGDRVTXXCKASQSIHKNLAWYQQKXGXXPKXLIYYAXXLQTGXPSRFSGSGSGTDFTLTISXLQPEDXATYXCQQYYSGXTFGGGTKVEXK

SEQ ID NO: 5330 - protein, 106 aa, Artificial Sequence
  source: /note="Description of Artificial Sequence: Synthetic light chain variable domain"
  MOD_RES (43)..(43): Any amino acid
  MOD_RES (46)..(46): Any amino acid
  MOD_RES (52)..(53): Any amino acid
  MOD_RES (58)..(58): Any amino acid
  MOD_RES (83)..(83): Any amino acid
  MOD_RES (95)..(95): Any amino acid
DIQMTQSPSSLSASVGDRVTITCKASQSIHKNLAWYQQKPGKXPKXLIYYAXXLQTGXPSRFSGSGSGTDFTLTISSLQPEDXATYYCQQYYSGXTFGGGTKVEIK

SEQ ID NO: 5331 - protein, 107 aa, Artificial Sequence
  source: /note="Description of Artificial Sequence: Synthetic light chain variable domain"
  MOD_RES (9)..(9): Any amino acid
  MOD_RES (17)..(18): Any amino acid
  MOD_RES (40)..(40): Any amino acid
  MOD_RES (43)..(43): Any amino acid
  MOD_RES (45)..(45): Any amino acid
  MOD_RES (48)..(48): Any amino acid
  MOD_RES (50)..(51): Any amino acid
  MOD_RES (70)..(70): Any amino acid
  MOD_RES (72)..(72): Any amino acid
  MOD_RES (74)..(74): Any amino acid
  MOD_RES (76)..(76): Any amino acid
  MOD_RES (83)..(84): Any amino acid
  MOD_RES (100)..(100): Any amino acid
  MOD_RES (103)..(103): Any amino acid
  MOD_RES (106)..(106): Any amino acid
DIQMTQSPXSLSASVGXXVTITCRASEHIYSYLSWYQQKXGKXPXLLXYXXKTLAEGVPSRFSGSGSGTXFXLXIXSLQPEDXXTYYCQHHFGSPLTFGXGTXLEXK

SEQ ID NO: 5332 - protein, 107 aa, Artificial Sequence
  source: /note="Description of Artificial Sequence: Synthetic light chain variable domain"
  MOD_RES (43)..(43): Any amino acid
  MOD_RES (50)..(51): Any amino acid
  MOD_RES (70)..(70): Any amino acid
  MOD_RES (83)..(83): Any amino acid
DIQMTQSPSSLSASVGDRVTITCRASEHIYSYLSWYQQKPGKXPKLLIYXXKTLAEGVPSRFSGSGSGTXFTLTISSLQPEDXATYYCQHHFGSPLTFGQGTRLEIK

SEQ ID NO: 5333 - protein, 106 aa, Artificial Sequence
  source: /note="Description of Artificial Sequence: Synthetic light chain variable domain"
DIQMTQSPSSLSASVGDRVTITCKASQSIHKNLAWYQQKPGKAPKLLIYYANSLQTGVPSRFSGSGSGTDFTLTISSLQPEDFATYYCQQYYSGWTFGGGTKVEIK

SEQ ID NO: 5334 - protein, 106 aa, Artificial Sequence
  source: /note="Description of Artificial Sequence: Synthetic light chain variable domain"
DIQMTQSPSSLSASVGDRVTITCKASQSIHKNLAWYQQKPGKAPKFLIYYANSLQTGVPSRFSGSGSGTDFTLTISSLQPEDFATYYCQQYYSGWTFGGGTKVEIK

SEQ ID NO: 5335 - protein, 106 aa, Artificial Sequence
  source: /note="Description of Artificial Sequence: Synthetic light chain variable domain"
DIQMTQSPSSLSASVGDRVTITCKASQSIHKNLAWYQQKPGKAPKFLIYYANSLQTGIPSRFSGSGSGTDFTLTISSLQPEDFATYYCQQYYSGWTFGGGTKVEIK

SEQ ID NO: 5336 - protein, 106 aa, Artificial Sequence
  source: /note="Description of Artificial Sequence: Synthetic light chain variable domain"
DIQMTQSPSSLSASVGDRVTITCKASQSIHKNLAWYQQKPGKVPKLLIYYANSLQTGVPSRFSGSGSGTDFTLTISSLQPEDVATYYCQQYYSGWTFGGGTKVEIK

SEQ ID NO: 5337 - protein, 106 aa, Artificial Sequence
  source: /note="Description of Artificial Sequence: Synthetic light chain variable domain"
DIQMTQSPSSLSASVGDRVTITCKASQSIHKNLAWYQQKPGKVPKFLIYYANSLQTGVPSRFSGSGSGTDFTLTISSLQPEDVATYYCQQYYSGWTFGGGTKVEIK

SEQ ID NO: 5338 - protein, 106 aa, Artificial Sequence
  source: /note="Description of Artificial Sequence: Synthetic light chain variable domain"
DIQMTQSPSSLSASVGDRVTITCKASQSIHKNLAWYQQKPGKVPKFLIYYANSLQTGIPSRFSGSGSGTDFTLTISSLQPEDVATYYCQQYYSGWTFGGGTKVEIK

SEQ ID NO: 5339 - protein, 106 aa, Artificial Sequence
  source: /note="Description of Artificial Sequence: Synthetic light chain variable domain"
DIQMTQSPSSLSASVGDRVTITCKASQSIHKNLAWYQQKPGKAPKLLIYYANSLQTGVPSRFSGSGSGTDFTLTISSLQPEDFATYFCQQYYSGWTFGGGTKVEIK

SEQ ID NO: 5340 - protein, 106 aa, Artificial Sequence
  source: /note="Description of Artificial Sequence: Synthetic light chain variable domain"
DIQMTQSPSSLSASVGDRVTITCKASQSIHKNLAWYQQKPGKAPKFLIYYANSLQTGVPSRFSGSGSGTDFTLTISSLQPEDFATYFCQQYYSGWTFGGGTKVEIK

SEQ ID NO: 5341 - protein, 106 aa, Artificial Sequence
  source: /note="Description of Artificial Sequence: Synthetic light chain variable domain"
DIQMTQSPSSLSASVGDRVTITCKASQSIHKNLAWYQQKPGKAPKLLIYYANSLQTGIPSRFSGSGSGTDFTLTISSLQPEDFATYYCQQYYSGWTFGGGTKVEIK

SEQ ID NO: 5342 - protein, 107 aa, Artificial Sequence
  source: /note="Description of Artificial Sequence: Synthetic light chain variable domain"
DIVMTQSHKFMSTSVGDRVSITCKASQGVSTTVAWYQQKPGQSPKLLIYSASYRYTGVPDRFTGSGSGTDFTFTISSVQSEDLAVYYCQHYYSTPWTFGGGTKLEIK

SEQ ID NO: 5343 - protein, 107 aa, Artificial Sequence
  source: /note="Description of Artificial Sequence: Synthetic light chain variable domain"
DIQMTQSPASLSASVGETVTITCRASEHIYSYLSWYQQKQGKSPQLLVYNAKTLAEGVPSRFSGSGSGTQFSLKINSLQPEDFGTYYCQHHFGSPLTFGAGTTLELK

SEQ ID NO: 5344 - protein, 106 aa, Artificial Sequence
  source: /note="Description of Artificial Sequence: Synthetic light chain variable domain"
DIQMTQSPSLLSASVGDRVTLNCKASQSIHKNLAWYQQKLGEAPKFLIYYANSLQTGIPSRFSGSGSGTDFTLTISGLQPEDVATYFCQQYYSGWTFGGGTKVELK

SEQ ID NO: 5345 - protein, 111 aa, Artificial Sequence
  source: /note="Description of Artificial Sequence: Synthetic light chain variable domain"
DIVLTQSPASLAVSLGQRATISCRASESVDSYGKSFMHWYQQKPGQPPKLLIYRASNLESGIPARFSGSGSRTDFTLTINPVEADDVATYYCQQSNEDPTFGGGTKLEIKR

SEQ ID NO: 5346 - protein, 108 aa, Artificial Sequence
  source: /note="Description of Artificial Sequence: Synthetic light chain variable domain"
DIVMTQSQKFMSTSVGDRVSVNCKASQNVGTNVVWYQQKPGQSPKALIYSASYRYSGVPDRFTGSGSGTDFTLTISTVQSEDLAEYFCQQYNSYPLTFGGGTKLEIKR

SEQ ID NO: 5347 - protein, 109 aa, Artificial Sequence
  source: /note="Description of Artificial Sequence: Synthetic light chain variable domain"
QAVVTQESALTTSPGETVTLTCRSSTGAVTTSNYANWVQEKPDHLFTGLIGGTNNRAPGVPARFSGSLIGDKAALTITGAQTEDEAIYFCALWYSNHWVFGGGTKLTVL

SEQ ID NO: 5348 - protein, 97 aa, Artificial Sequence
  source: /note="Description of Artificial Sequence: Synthetic light chain variable domain"
EKVTMSCKSSQSLLYSSNQKNYLAWYQQKPGQSPKLLIYWASARESGVPDRFTGGGSGTDFTLTISSVQAEDLAVYYCHQYLSSYTFGGGTKLEIKR

SEQ ID NO: 5349 - protein, 109 aa, Artificial Sequence
  source: /note="Description of Artificial Sequence: Synthetic light chain variable domain"
QIVLTQSPAIMSASPGEKVTLTCSASSSVSSSYLYWYQQKPGSSPKLWIYSTSNLASGVPARFSGGGSGTSYSLTISSMEAEDAASYFCHQWSTYPYTFGGGTKLEIKR

SEQ ID NO: 5350 - protein, 107 aa, Artificial Sequence
  source: /note="Description of Artificial Sequence: Synthetic light chain variable domain"
DIVMTQSHKFMSTSVGDRVSITCKASQDVNTAVAWYQQKPGHSPKLLIYSASYHYTGVPDRFTGSGSGTDFTFTISSVQAEDLAVYYCQQHYSTPWTFGGGTKLEIK

SEQ ID NO: 5351 - protein, 112 aa, Artificial Sequence
  source: /note="Description of Artificial Sequence: Synthetic light chain variable domain"
NIMMTQSPSSLAVSAGEKVTMSCKSSQSVLYSSNQKNYLAWYQQKPGQSPKLLIYWASTRESGVPDRFTGSGSGTDFTLTINNVQAEDLAVYYCHQYLSSWTFGGGTKLEIK

SEQ ID NO: 5352 - protein, 107 aa, Artificial Sequence
  source: /note="Description of Artificial Sequence: Synthetic light chain variable domain"
DIQMTQSPSSLSASLGERVSLTCRASQEISGYLSWLQQKPDGTIKRLIYAASTLDSGVPKRFSGSRSGSDYSLTISSLESEDFADYYCLQYASYPLTFGAGTKLELK

SEQ ID NO: 5353 - protein, 112 aa, Artificial Sequence
  source: /note="Description of Artificial Sequence: Synthetic light chain variable domain"
NIMMTQSPSSLAVSAGEKVTMSCKSSQSVLYSSNQKNYLAWYQQKPGQSPKLLIYWASTRESGVPDRFTGSGSETDFTLTISSVQTEDLAVYYCHQYLSSWTFGGGTKLEIK

SEQ ID NO: 5354 - protein, 112 aa, Artificial Sequence
  source: /note="Description of Artificial Sequence: Synthetic light chain variable domain"
DIVLTQSPASLAVSLGQRATISCRASESVDSYGKSFMHWYQQKPGQPPKLLIYRASNLESGIPARFSGSGSRTDFTLTINPVEADDVATYYCQQSNEDPYTFGGGTKLEIKR

SEQ ID NO: 5355 - protein, 111 aa, Artificial Sequence
  source: /note="Description of Artificial Sequence: Synthetic light chain variable domain"
DIVLTQSPASLAVSLGQRATISCRASESVDIYGNSFMHWYQQKPGQPPKLLIYRASNLESGIPARFRGSGSRTDFTLTIYPVEADDVATYYCQQSNEDPWTFGGGTKLEIK

SEQ ID NO: 5356 - protein, 103 aa, Artificial Sequence
  source: /note="Description of Artificial Sequence: Synthetic light chain variable domain"
GVVVTQSPTSLAVSLGQRATISCKASQSVDHAGDSYMNWYQQKAGQPPKLLIYGASYLESVIPGRFSGSGSGTDFTLNIHPVEEEDVATYFCQQSNEDPYTFG

SEQ ID NO: 5357 - protein, 108 aa, Artificial Sequence
  source: /note="Description of Artificial Sequence: Synthetic light chain variable domain"
ENVLTQSPAIMSASPGEKVTMTCRASSSVSSNYLHWYQQKSGASPKLWIYSTSNLASGVPDRFRGSGSGTSYSLTITSVEAEDAATYYCQLYSGYPLTFGAGTKLELK

SEQ ID NO: 5358 - protein, 113 aa, Artificial Sequence
  source: /note="Description of Artificial Sequence: Synthetic light chain variable domain"
NIMMTQSPSSLAVSAGEKVTMSCKSSQSLLYSSNQKNYLAWYQQKPGQSPKLLIYWASARESGVPDRFTGGGSGTDFTLTISSVQAEDLAVYYCHQYLSSYTFGGGTKLEIKR

SEQ ID NO: 5359 - protein, 109 aa, Artificial Sequence; identical to SEQ ID NO: 5349
  source: /note="Description of Artificial Sequence: Synthetic light chain variable domain"

SEQ ID NO: 5360 - protein, 107 aa, Artificial Sequence; identical to SEQ ID NO: 5350
  source: /note="Description of Artificial Sequence: Synthetic light chain variable domain"

SEQ ID NO: 5361 - protein, 112 aa, Artificial Sequence; identical to SEQ ID NO: 5351
  source: /note="Description of Artificial Sequence: Synthetic light chain variable domain"

SEQ ID NO: 5362 - protein, 107 aa, Artificial Sequence; identical to SEQ ID NO: 5352
  source: /note="Description of Artificial Sequence: Synthetic light chain variable domain"

SEQ ID NO: 5363 - protein, 112 aa, Artificial Sequence; identical to SEQ ID NO: 5353
  source: /note="Description of Artificial Sequence: Synthetic light chain variable domain"

SEQ ID NO: 5364 - protein, 111 aa, Artificial Sequence; identical to SEQ ID NO: 5355
  source: /note="Description of Artificial Sequence: Synthetic light chain variable domain"

SEQ ID NO: 5365 - protein, 103 aa, Artificial Sequence; identical to SEQ ID NO: 5356
  source: /note="Description of Artificial Sequence: Synthetic light chain variable domain"

SEQ ID NO: 5366 - protein, 108 aa, Artificial Sequence; identical to SEQ ID NO: 5357
  source: /note="Description of Artificial Sequence: Synthetic light chain variable domain"

SEQ ID NO: 5367 - protein, 108 aa, Artificial Sequence; identical to SEQ ID NO: 5346
  source: /note="Description of Artificial Sequence: Synthetic light chain variable domain"

SEQ ID NO: 5368 - protein, 112 aa, Artificial Sequence; identical to SEQ ID NO: 5354
  source: /note="Description of Artificial Sequence: Synthetic light chain variable domain"

SEQ ID NO: 5369 - protein, 109 aa, Artificial Sequence; identical to SEQ ID NO: 5347
  source: /note="Description of Artificial Sequence: Synthetic light chain variable domain"

SEQ ID NO: 5370 - protein, 106 aa, Artificial Sequence
  source: /note="Description of Artificial Sequence: Synthetic light chain variable domain"
QIVLTQSPAIMSASLGEEITLTCSASSSVSYMHWYQQKSGTSPKLLIYSTSNLASGVPSRFSGSGSGTFYSLTISSVEAEDAADYYCHQWSSYPYTFGGGTKLEIK

SEQ ID NO: 5371 - protein, 109 aa, Artificial Sequence
  source: /note="Description of Artificial Sequence: Synthetic light chain variable domain"
NIMMTQSPSSLAVSAGEKVTMSCKSSQSVSNQKNYLAWYQQKPGQSPKLLIYWASTRESGVPDRFTGSGSGTDFTLTISSVQAEDLAVYYCHQYLSSYTFGGGTKLEIK

SEQ ID NO: 5372 - protein, 106 aa, Artificial Sequence
  source: /note="Description of Artificial Sequence: Synthetic light chain variable domain"
DIQLTQSPASLSASVGETVTITCRASGNIHNYLAWYQQKQGKSPQLLVYNAKTLADGVPSRFSGSGSGTQYSLKINSLQPEDFGSYYCQHFWITPWTFGGGTKLEI

SEQ ID NO: 5373 - protein, 110 aa, Artificial Sequence
  source: /note="Description of Artificial Sequence: Synthetic light chain variable domain"
QAVVTQESALTTSPGETVTLTCRSSTGAVTTSNYANWVQEKPDHLFTGLIGGTNNRGPGVPARFSGSLIGDKAALTITGAQTEDEAVYFCALWYSNHWVFGGGTKLTVLG

SEQ ID NO: 5374 - protein, 90 aa, Artificial Sequence
  source: /note="Description of Artificial Sequence: Synthetic light chain variable domain"
EEITLTCSASSSVSYMHWYQQKSGTSPKLLIYSTSNLASGVPSRFSGSGSGTFYSLTISSVEAEDAADYYCHQWSSYPYTFGGGTKLEIK

SEQ ID NO: 5375 - protein, 112 aa, Artificial Sequence
  source: /note="Description of Artificial Sequence: Synthetic light chain variable domain"
NIMMTQSPSSLAVSAGEKVTMSCKSSQSVLYSSNQKNYLAWYQQKPGQSPKLLIYWASTRESGVPDRFTGSGSGTDFTLTISSVQAEDLAVYYCHQYLSSYTFGGGTKLEIK

SEQ ID NO: 5376 - protein, 112 aa, Artificial Sequence
  source: /note="Description of Artificial Sequence: Synthetic light chain variable domain"
QAVVTQESALTTSPGETVTLTCRSSTGAVTTSNYANWVQEKPDHLFTGLIGGTNNRAPGVPARFSGSLIGDKAALTITGAQTEDEAIYFCALWYSNHWVFGGGTKLTVLGQP

SEQ ID NO: 5377 - protein, 214 aa, Artificial Sequence
  source: /note="Description of Artificial Sequence: Synthetic light chain variable domain"
DIQMTQSPILLSASVGDRVTITCRASRDIKSYLNWYQQRTNGSPRLLIYYATSLAEGVPSRFSGSGSGTDYTLTISSLQPEDIADYYCLQHGESPWTFGQGTKVEIKRTVAAPSVFIFPPSDEQLKSGTASVVCLLNNFYPREAKVQWKVDNALQSGNSQESVTEQDSKDSTYSLSSTLTLSKADYEKHKVYACEVTHQGLSSPVTKSFNRGEC

SEQ ID NO: 5378 - protein, 214 aa, Artificial Sequence
  source: /note="Description of Artificial Sequence: Synthetic light chain variable domain"
DIQMTQSPILLSASVGDRVTITCRASRDIKSYLNWYQQRTNGSPRLLIYYATSLAEGVPSRFSGSGSGTDYTLTISSLQPEDEADYYCLQHGESPWTFGQGTKVEIKRTVAAPSVFIFPPSDEQLKSGTASVVCLLNNFYPREAKVQWKVDNALQSGNSQESVTEQDSKDSTYSLSSTLTLSKADYEKHKVYACEVTHQGLSSPVTKSFNRGEC

SEQ ID NO: 5379 - protein, 113 aa, Artificial Sequence
  source: /note="Description of Artificial Sequence: Synthetic light chain variable domain"
DVVMTQSPLSLPVSLGDQASISCRSSQRLVHSNGNTYLHWYLQKPGQSPKLLIYRVSNRFPGVPDRFSGSGSGTDFTLKISRVEAEDLGIYFCSQSTHVPYTFGGGTKLEIKR

SEQ ID NO: 5380 - protein, 106 aa, Artificial Sequence
  source: /note="Description of Artificial Sequence: Synthetic light chain variable domain"
DIVMTQSHIFMSTSVGDRVSITCKASQDVDTAVAWYQQKPGQSPKLLIYWASTRLTGVPDRFTGSGSGTDFTLTISNVQSEDLADYFCQQYSSYPYTGGGTKLEIK

SEQ ID NO: 5381 - protein, 108 aa, Artificial Sequence; identical to SEQ ID NO: 3483
  source: /note="Description of Artificial Sequence: Synthetic light chain variable domain"

SEQ ID NO: 5382 - protein, 107 aa, Artificial Sequence; identical to SEQ ID NO: 3484
  source: /note="Description of Artificial Sequence: Synthetic light chain variable domain"

SEQ ID NO: 5383 - protein, 108 aa, Artificial Sequence; identical to SEQ ID NO: 3485
  source: /note="Description of Artificial Sequence: Synthetic light chain variable domain"

SEQ ID NO: 5384 - protein, 219 aa, Artificial Sequence
  source: /note="Description of Artificial Sequence: Synthetic light chain variable domain"
DVVMTQTPLLLSVTIGQPASISCKSSQSLLDSDGKTYLNWLLQRTNGSPRRLIYLVSKLDSGVPDRFTGSGSGTDFTLKISRVEAEDIADYYCWQGTHFPLTFGAGTKLELKRADAAPTVSIFPPSSEQLTSGGASVVCFLNNFYPKDINVKWKIDGSERQNGVLNSWTDQDSKDSTYSMSSTLTLTKDEYERHNSYTCEATHKTSTSPIVKSFNRNEC

SEQ ID NO: 5385 - protein, 219 aa, Artificial Sequence
  source: /note="Description of Artificial Sequence: Synthetic light chain variable domain"
DVVMTQTPLLLSVTIGQPASISCKSSQSLLDSDGKTYLNWLLQRTNGSPRRLIYLVSKLDSGVPDRFTGSGSGTDFTLKISRVEAEDEADYYCWQGTHFPLTFGAGTKLELKRADAAPTVSIFPPSSEQLTSGGASVVCFLNNFYPKDINVKWKIDGSERQNGVLNSWTDQDSKDSTYSMSSTLTLTKDEYERHNSYTCEATHKTSTSPIVKSFNRNEC

SEQ ID NO: 5386 - protein, 128 aa, Artificial Sequence
  source: /note="Description of Artificial Sequence: Synthetic light chain variable domain"
MTMFSLALLLSLLLLCVSDSRAETTVTQSPASLSMAGEKVTIRCITSNDIDDDMNWYQQKPGEPPKLLISEGNTLRPGVPSRFSSSGYGTDFVFTIEDILSEDVADYYCFQSDNLPYTFGGGTKLEIK

SEQ ID NO: 5387 - protein, 129 aa, Artificial Sequence
  source: /note="Description of Artificial Sequence: Synthetic light chain variable domain"
MTMFSLALLLSLLLLCVSDSRADIQMTQSPSSLSASVGDRVTITCITSNDIDDDMNWYQQKPGKAPKLLISEGNTLRPGVPSRFSGSGYGTDFTLTISSLQPEDVATYYCFQSDNLPYTFGQGTKVEIK

SEQ ID NO: 5388 - protein, 115 aa, Artificial Sequence
  source: /note="Description of Artificial Sequence: Synthetic light chain variable domain"
DIQLTQSPASLSVSAGEKVTMSCKSSQSLLNSGNQKNYLAWYQQKPGQPPKLLIHGASTRESGVPDRFTGSGSGTDFTLTISSVQAEDLAVYYCQNDYSYPLTFGAGTKLELKRL

SEQ ID NO: 5389 - protein, 107 aa, Artificial Sequence
  source: /note="Description of Artificial Sequence: Synthetic light chain variable domain"
DIVMTQSQKFMSSSVGDRVSVTCKASQNVNTNVAWYQQKQGQSPRPLIYSASSRCSGVPDRFTGSGFGTDFTLTISNVQSEDLAEYFCQQYHSFPLTFGAGAKLDLK

SEQ ID NO: 5390 - protein, 107 aa, Artificial Sequence
  source: /note="Description of Artificial Sequence: Synthetic light chain variable domain"
DIVMTQSHKFMSTSVGDRVSITCKASQDVGTAVAWYQQKPGQSPKLLIYWASTRHTGVPDRFTGSGSGTDFTLTISNVQSEDLADYFCQQYSSSLTFGAGATKLELK

SEQ ID NO: 5391 - protein, 107 aa, Artificial Sequence
  source: /note="Description of Artificial Sequence: Synthetic light chain variable domain"
DIQMTQSPSSLSASVGDRVTITCRASQSISYFLNWYQQKPGKAPKLLIYAASSLQSGVPSRFSGSGSGTDFTLTISSLQPEDFATYYCQQSYSTPPTFGGGTKVEIK

SEQ ID NO: 5392 - protein, 120 aa, Artificial Sequence
  source: /note="Description of Artificial Sequence: Synthetic light chain variable domain"
QVQLVQSGAEVKKPGASVKVSCKASGYTFTGYYMHWVRQAPGQGLEWMGWINPNSGGTNYAQKFQGRVTMTRDTSISTAYMELSRLRSDDTAVYYCARSYSNYVRYFDYWGQGTLVTVSS

SEQ ID NO: 5393 - protein, 107 aa, Artificial Sequence
  source: /note="Description of Artificial Sequence: Synthetic light chain variable domain"
EIQMTQTTSSLSASLGDRVTISCRASQDISNFLNWYQQKPDGTVKLLIYYTSTLHSGVPSRFSGSGSGTDYSLTISNLEQEDIATYFCQQGKTLPPTFGGGTKLEIK

SEQ ID NO: 5394 - protein, 106 aa, Artificial Sequence
  source: /note="Description of Artificial Sequence: Synthetic light chain variable domain"
DIVMTQSHKFMSTSVGDRVSITCKASQDVGSAVAWYQQKPGQSPKLLIYWASTRHTGVPDRFTGSGSGTDFTFTISNVQSEDLADYFCQQYSSSLTFGAGATKLEL

SEQ ID NO: 5395 - protein, 111 aa, Artificial Sequence
  source: /note="Description of Artificial Sequence: Synthetic light chain variable domain"
QSVLTQPPSASGTPGQRVTISCTGSSSNIGNNAVTWYQQLPGTAPKLLIYDDSHRPSGVPDRFSGSKSGTSASLAISGLRSEDEADYYCGTWDYSLSGYVFGGGTKLTVLG

SEQ ID NO: 5396 - protein, 111 aa, Artificial Sequence
  source: /note="Description of Artificial Sequence: Synthetic light chain variable domain"
QSVLTQPPSASGTPGQRVTISCTGSSSNIGSNNVTWYQQLPGTAPKLLIYSDSHRPSGVPDRFSGSKSGTSASLAISGLQSEDEADYYCGSWDYSLSAYVFGGGTKLTVLG

SEQ ID NO: 5397 - protein, 111 aa, Artificial Sequence
  source: /note="Description of Artificial Sequence: Synthetic light chain variable domain"
QSVLTQPPSASGTPGQRVTISCTGSSSNIGSNYVSWYQQLPGTAPKLLIYADSQRPSGVPDRFSGSKSGTSASLAISGLRSEDEADYYCGTWDYSLSGYVLGGGTKLTVLG

SEQ ID NO: 5398 - protein, 111 aa, Artificial Sequence
  source: /note="Description of Artificial Sequence: Synthetic light chain variable domain"
QSVLTQPPSASGAPGQRVTISCSGSSSNIGSNDVSWYQQLPGTAPKLLIYADSNRPSGVPDRFSGSKSGTSASLAISGLRSEDEADYYCGSWDYSLSGYVFGGGTKLTVLG

SEQ ID NO: 5399 - protein, 111 aa, Artificial Sequence
  source: /note="Description of Artificial Sequence: Synthetic light chain variable domain"
QSVLTQPPSSSGTPGQRVTISCTGSSSNIGSNAVTWYQQLPGTAPKLLIYDDNHRPSGVPDRFSGSKSGTSASLAISGLRSEDEADYYCGAWDYSLNAYVFGGGTKLTVLG

SEQ ID NO: 5400 - protein, 111 aa, Artificial Sequence
  source: /note="Description of Artificial Sequence: Synthetic light chain variable domain"
QSVLTQPPSASGTPGQRVIISCSASSSNIGSNAVYWYQQLPGTAPKLLIYSDNQRPSGVPDRFSGSKSGTSASLAISGLRSEDEADYYCGSWDYSLSAYVFGGGTKLTVLG

SEQ ID NO: 5401 - protein, 111 aa, Artificial Sequence
  source: /note="Description of Artificial Sequence: Synthetic light chain variable domain"
QSVLTQPPSLSGTPGQRVTISCTGSSSNIGSNSVSWYQQLPGTAPKLLIYDDNNRPSGVPDRFSGSKSGTSASLAISGLRSEDEADYYCGAWDYSLSAYVFGGGTKLTVLG

SEQ ID NO: 5402 - protein, 111 aa, Artificial Sequence
  source: /note="Description of Artificial Sequence: Synthetic light chain variable domain"
QSVLTQPPSPSGTPGQRVTISCTGSSSNIGNYYVYWYQQLPGTAPKLLIYANSHRPSGVPDRFSGSKSGTSASLAISGLRSEDEADYYCGSWDDSLSAYVFGGGTKLTVLG

SEQ ID NO: 5403 - protein, 163 aa, Artificial Sequence
  source: /note="Description of Artificial Sequence: Synthetic light chain variable domain"
DVVMTQSPLSLPVTLGQPASISCRSSQSLYYRDGYTFLDWYVQKPGQSPQLLIYLSSKRDSGVPDRISGSGSGTDFTLRISRVEAEDVGVYYCMQGTHWPYTFGQGTKLEIKRTVAAPSVFIFPPSDEQLKSGTASVVCLLNNFYPREAKVQWKVDNALQSGN

SEQ ID NO: 5404 - protein, 163 aa, Artificial Sequence
  source: /note="Description of Artificial Sequence: Synthetic light chain variable domain"
DVVMTQSPLSLPVTLGQPASISCRSSQSLYYRDGYTFLDWYVQKPGQSPQLLIYQSSKRDSGVPDRISGSGSGTDFTLRISRVEAEDVGVYYCMQGTHWPYTFGQGTKLEIKRTVAAPSVFIFPPSDEQLKSGTASVVCLLNNFYPREAKVQWKVDNALQSGN

SEQ ID NO: 5405 - protein, 163 aa, Artificial Sequence
  source: /note="Description of Artificial Sequence: Synthetic light chain variable domain"
DVVMTQSPLSLPVTLGQPASISCRSSQSLYYRDGYTFLDWYVQKPGQSPQLLIYRSSKRDSGVPDRISGSGSGTDFTLRISRVEAEDVGVYYCLQGTHWPYTFGQGTKLEIKRTVAAPSVFIFPPSDEQLKSGTASVVCLLNNFYPREAKVQWKVDNALQSGN

SEQ ID NO: 5406 - protein, 163 aa, Artificial Sequence
  source: /note="Description of Artificial Sequence: Synthetic light chain variable domain"
DVVMTQSPLSLPVTLGQPASISCRSSQSLYYRDGYTFLDWYVQKPGQSPQLLIYQSSKRDSGVPDRISGSGSGTDFTLRISRVEAEDVGVYYCLQGTHWPYTFGQGTKLEIKRTVAAPSVFIFPPSDEQLKSGTASVVCLLNNFYPREAKVQWKVDNALQSGN

SEQ ID NO: 5407 - protein, 163 aa, Artificial Sequence
  source: /note="Description of Artificial Sequence: Synthetic light chain variable domain"
DVVMTQSPLSLPVTLGQPASISCRSSQSLYYRDGYTFLDWYVQKPGQSPQLLIYQSSKRDSGVPDRISGSGSGTDFTLRISRVEAEDVGVYYCFQGTHWPYTFGQGTKLEIKRTVAAPSVFIFPPSDEQLKSGTASVVCLLNNFYPREAKVQWKVDNALQSGN

SEQ ID NO: 5408 - protein, 163 aa, Artificial Sequence
  source: /note="Description of Artificial Sequence: Synthetic light chain variable domain"
DVVMTQSPLSLPVTLGQPASISCRSSQSLYYRSGYTFLDWYVQKPGQSPQLLIYQSSKRDSGVPDRISGSGSGTDFTLRISRVEAEDVGVYYCMQGTHWPYTFGQGTKLEIKRTVAAPSVFIFPPSDEQLKSGTASVVCLLNNFYPREAKVQWKVDNALQSGN

SEQ ID NO: 5409 - protein, 163 aa, Artificial Sequence
  source: /note="Description of Artificial Sequence: Synthetic light chain variable domain"
DVVMTQSPLSLPVTLGQPASISCRSSQSLYYRSGYTFLDWYVQKPGQSPQLLIYQSSKRDSGVPDRISGSGSGTDFTLRISRVEAEDVGVYYCFQGTHWPYTFGQGTKLEIKRTVAAPSVFIFPPSDEQLKSGTASVVCLLNNFYPREAKVQWKVDNALQSGN

SEQ ID NO: 5410 - protein, 163 aa, Artificial Sequence
  source: /note="Description of Artificial Sequence: Synthetic light chain variable domain"
DVVMTQSPLSLPVTPGESASISCRSSQSLLHGNGNNYLDWYLQKPGQSPQLLIYLGSNRASGVPDRFSGSGSGTDFTLQISRVEPEDVGVYYCMQALQTPYTFGQGTKLEIKRTVAAPSVFIFPPSDEQLKSGTASVVCLLNNFYPREAKVQWKVDNALQSGN

SEQ ID NO: 5411 - protein, 158 aa, Artificial Sequence
  source: /note="Description of Artificial Sequence: Synthetic light chain variable domain"
DVVMTQSPSSLSASVGDRVTVTCRASQNIASYLNWYQQKPGKAPKLLIYAASSLKSGVPSRFSGSGSGRDFTLTISSLQPEDFAAYYCQQSYSIPYTFGQGTKVEIKRTVAAPSVFIFPPSDEQLKSGTASVVCLLNNFYPREAKVQWKVDNALQLGN

SEQ ID NO: 5412 - protein, 159 aa, Artificial Sequence
  source: /note="Description of Artificial Sequence: Synthetic light chain variable domain"
EIVLTQSPGTLSLSPGERATLSCRASQSVSNNYLGWYQQKPGQAPRLLIYGASSRATGVPARFSGSGSGTDFTLTISSLEPEDFAVYYCQQRSNWPLTFGGGTKVEIKRTVAAPSVFIFPPSDEQLKSGTASVVCLLNNFYPREAKVQWKVDNALQSGN

SEQ ID NO: 5413 - protein, 163 aa, Artificial Sequence
  source: /note="Description of Artificial Sequence: Synthetic light chain variable domain"
DVVMTQSPLSLSVTPGEPASISCRSSQSLVYSDGKTYLDWFLQRPGQSPRRLIYKVSNRDSGVSDRFSGSGSGTDFTLKISRVEAEDVGVYYCMQGAHWPPTFGQGTRVEIKRTVAAPSVFIFPPSDEQLKSGTASVVCLLNNFYPREAKVQWKVDNALQSGN

SEQ ID NO: 5414 - protein, 159 aa, Artificial Sequence
  source: /note="Description of Artificial Sequence: Synthetic light chain variable domain"
EIVLTQSPGTLSLSPGERATLSCRASQSVSSSYLAWYQQKPGQAPRLLIYGASSRATGIPARFSGSGSGTDFTLTISSLEPEDFAVYYCQQRSNWPPTFGPGTKVDIKRTVAAPSVFIFPPSDEQLKSGTASVVCLLNNFYPREAKVQWKVDNALQSGN

SEQ ID NO: 5415 - protein, 162 aa, Artificial Sequence
  source: /note="Description of Artificial Sequence: Synthetic light chain variable domain"
NFMLTQPHSVSESPGKTVTVSCTRSRGSIASSYVQWYQQRPGRSPTNVIYENDQRPSGVPTRFSGSVDRSSNSASLTISGLETEDEADYYCQSYDFSTVVFGGGTKLTVLSQPKAAPSVTLFPPSSEELQANKATLVCLISDFYPGAVTVAWKADSSPVKAG

SEQ ID NO: 5416 - protein, 159 aa, Artificial Sequence
  source: /note="Description of Artificial Sequence: Synthetic light chain variable domain"
EIVLTQSPGTLSLSPGERATLSCRASQSVSSSYLAWYQQKPGQAPRLLIYGASSRATGIPDRFSVSGSGTDFTLTISRLEPEDFAVYYCQQYGSSPGTFGQGTKVEIKRTVAAPSVFIFPPSDEQLKSGTASVVCLLNNFYPREAKVQWKVDNALQSGN

SEQ ID NO: 5417 - protein, 163 aa, Artificial Sequence; identical to SEQ ID NO: 5403
  source: /note="Description of Artificial Sequence: Synthetic light chain variable domain"

SEQ ID NO: 5418 - protein, 163 aa, Artificial Sequence
  source: /note="Description of Artificial Sequence: Synthetic light chain variable domain"
DVVMTQSPLSLAVTPGEPASISCRSSQSLLYSNGYNYLDWYLQKPGQSPQLLIYLGSNRASGVPDRFSGSGSGTDFTLKISRVEAEDVGVYYCMQALQTPITFGPGTKVDIKRTVAAPSVFIFPPSDEQLKSGTASVVCLLNNFYPREAKVQWKVDNALQSGN

SEQ ID NO: 5419 - protein, 111 aa, Artificial Sequence
  source: /note="Description of Artificial Sequence: Synthetic light chain variable domain"
DIVMTQTPLSLSVTPGQPASISCRASESVDTYANSLMHWYLQKPGQPPQLLIYRASNLESGVPDRFSGSGSGTDFTLKISRVEAEDVGVYYCQQTNEDPRTFGQGTKLEIK

SEQ ID NO: 5420 - protein, 112 aa, Artificial Sequence
  source: /note="Description of Artificial Sequence: Synthetic light chain variable domain"
DIVMTQSPLSLPVTPGEPASISCRSSQTIVHSNGNTYLEWYLQKPGQSPQLLIYKVSNRFSGVPDRFSGSGSGTDFTLKISRVEAEDVGVYYCFQASHVPWTFGQGTKLEIK

SEQ ID NO: 5421 - protein, 112 aa, Artificial Sequence
  source: /note="Description of Artificial Sequence: Synthetic light chain variable domain"
DIVMTQSPLSLPVTPGEPASISCRSSQSIVHSNGNTYLEWYLQKPGQSPQLLIYKVSNRFSGVPDRFSGSGSGTDFTLKISRVEAEDVGVYYCFQGSHVPWTFGQGTKLEIK

SEQ ID NO: 5422 - protein, 107 aa, Artificial Sequence
  source: /note="Description of Artificial Sequence: Synthetic light chain variable domain"
DIQMTQSPSSLSASVGDRVTITCRASQSIDTRLNWYQQKPGKAPKLLIYSASSLQSGVPSRFSGSGSGTDFTLTISSLQPEDFATYYCQQSAYNPITFGQGTKVEIK

SEQ ID NO: 5423 - protein, 107 aa, Artificial Sequence
  source: /note="Description of Artificial Sequence: Synthetic light chain variable domain"
DIQMTQSPSSLSASVGDRVTITCRASQSINTNLNWYQQKPGKAPKLLIYAASSLQSGVPSRFSGSGSGTDFTLTISSLQPEDFATYYCQQARDTPITFGQGTKVEIK

SEQ ID NO: 5424 - protein, 128 aa, Artificial Sequence
  source: /note="Description of Artificial Sequence: Synthetic light chain variable domain"
MDLQVQIISFLLISASVIMSRGQIVLTQSPAIMSASPGEKVTITCSARSSVSYMHWFQQKPGTSPKLWIYRTSNLASGVPARFSGSGSGTSYCLTISRMEAEDAATYYCQQRSSFPLTFGSGTKLEIK

SEQ ID NO: 5425 - protein, 112 aa, Artificial Sequence
  source: /note="Description of Artificial Sequence: Synthetic light chain variable domain"
QSVLTQPPSVSGAPGQRVTISCTGSSSNIGAGYDVHWYQQLPGTAPKLLIYGNSNRPSGVPDRFSGSKSGTSASLAISGLQSEDEADYYCAAWDDSLNGYVFGTGTKLTVLG

SEQ ID NO: 5426 - protein, 119 aa, Artificial Sequence
  source: /note="Description of Artificial Sequence: Synthetic light chain variable domain"
DVQLVQSGAEVKKPGASVKVSCKASGYTFTRYTMHWVRQAPGQGLEWIGYINPSRGYTNYADSVKGRFTITTDKSTSTAYMELSSLRSEDTATYYCARYYDDHYCLDYWGQGTTVTVSS

SEQ ID NO: 5427 - protein, 216 aa, Artificial Sequence
  source: /note="Description of Artificial Sequence: Synthetic light chain variable domain"
QAVVTQPPSASGTPGQRVTISCSGSSSNIGSNTVNWYQQVPGTAPKLLIYSNNQRPSGVPDRFSGSKSGTSASLAISGLQSEDEADYYCAAWDDSLNGWVFGGGTKLTVLGQPKANPTVTLFPPSSEELQANKATLVCLISDFYPGAVTVAWKADGSPVKAGVETTKPSKQSNNKYAASSYLSLTPEQWKSHRSYSCQVTHEGSTVEKTVAPTECS

SEQ ID NO: 5428 - protein, 108 aa, Artificial Sequence
  source: /note="Description of Artificial Sequence: Synthetic light chain variable domain"
DIQMTQSPSSLSASVGDRVTITCRASQSISSYLNWYQQKPGKAPKLLIYAASSLQSGVPSRFSGSGSGTDFTLTISSLQPEDFATYYCQQSYSTPLTFGGGTKVDIKR

SEQ ID NO: 5429 - protein, 111 aa, Artificial Sequence
  source: /note="Description of Artificial Sequence: Synthetic light chain variable domain"
QAVVTQPPSASGTPGQRVTISCSGSSSNIGSNTVNWYQQVPGTAPKLLIYSNNQRPSGVPDRFSGSKSGTSASLAISGLQSEDEADYYCAAWDDSLNGWVFGGGTKLTVLG

SEQ ID NO: 5430 - protein, 107 aa, Artificial Sequence
  source: /note="Description of Artificial Sequence: Synthetic light chain variable domain"
DIQMTQSPSTLSASVGDRVTITCRASQNINKWLAWYQQRPGKAPQLLIYKASSLESGVPSRFSGSGSGTEYTLTISSLQPDDFATYYCQQYNSYATFGQGTKVEIKR

SEQ ID NO: 5431 - protein, 109 aa, Artificial Sequence
  source: /note="Description of Artificial Sequence: Synthetic light chain variable domain"
QSVVTQPPSVSVAPGKTARITCGRNNIGSKSVHWYQQKPGQAPVLVVYDDSDRPSGIPERFSGSNSGNTATLTISRVEAGDEADYYCQVWDSSSDHVVFGGGTKLTVLG

SEQ ID NO: 5432 - protein, 107 aa, Artificial Sequence
  source: /note="Description of Artificial Sequence: Synthetic light chain variable domain"
DIQLTQSPSSLSASVGDRVTITCRASQSISSYLNWYQQKPGKAPKLLIYAASSLQSGVPSRFSGSGSGTDFTLTISSLQPEDFATYYCQQSYSTLWTFGQGTKVEIK

SEQ ID NO: 5433 - protein, 105 aa, Artificial Sequence
  source: /note="Description of Artificial Sequence: Synthetic light chain variable domain"
EIVLTQSPGTLSLSPGERATLSCRASQSVSSSYLAWYQQKPGQAPRLLIYGASSRATGIPDRFSGSGSGTDFTLTISRLEPEDFAVYYCQQYGSSFGQGTKLEIK

SEQ ID NO: 5434 - protein, 112 aa, Artificial Sequence
  source: /note="Description of Artificial Sequence: Synthetic light chain variable domain"
EIVLTQSPATLSLSPGERATLSCRASQSIVHSYGNTYAWYQQKPGQAPRLLIYRVSRATGIPARFSGSGSGTDFTLTISSLEPEDFAVYYCFQGTHVPYTFFGQGTKLEIKR

SEQ ID NO: 5435 - protein, 111 aa, Artificial Sequence; identical to SEQ ID NO: 3106
  source: /note="Description of Artificial Sequence: Synthetic light chain variable domain"

SEQ ID NO: 5436 - protein, 112 aa, Artificial Sequence; identical to SEQ ID NO: 3107
  source: /note="Description of Artificial Sequence: Synthetic light chain variable domain"

SEQ ID NO: 5437 - protein, 107 aa, Artificial Sequence; identical to SEQ ID NO: 3108
  source: /note="Description of Artificial Sequence: Synthetic light chain variable domain"

SEQ ID NO: 5438 - protein, 107 aa, Artificial Sequence; identical to SEQ ID NO: 3112
  source: /note="Description of Artificial Sequence: Synthetic light chain variable domain"

SEQ ID NO: 5439 - protein, 112 aa, Artificial Sequence; identical to SEQ ID NO: 3109
  source: /note="Description of Artificial Sequence: Synthetic light chain variable domain"

SEQ ID NO: 5440 - protein, 111 aa, Artificial Sequence; identical to SEQ ID NO: 3110
  source: /note="Description of Artificial Sequence: Synthetic light chain variable domain"

SEQ ID NO: 5441 - protein, 112 aa, Artificial Sequence; identical to SEQ ID NO: 3111
  source: /note="Description of Artificial Sequence: Synthetic light chain variable domain"

SEQ ID NO: 5442 - protein, 134 aa, Artificial Sequence; identical to SEQ ID NO: 3299
  source: /note="Description of Artificial Sequence: Synthetic light chain variable domain"

SEQ ID NO: 5443 - protein, 132 aa, Artificial Sequence; identical to SEQ ID NO: 773
  source: /note="Description of Artificial Sequence: Synthetic light chain variable domain"

SEQ ID NO: 5444 - protein, 107 aa, Artificial Sequence; identical to SEQ ID NO: 3300
  source: /note="Description of Artificial Sequence: Synthetic light chain variable domain"

SEQ ID NO: 5445 - protein, 111 aa, Artificial Sequence; identical to SEQ ID NO: 3301
  source: /note="Description of Artificial Sequence: Synthetic light chain variable domain"

SEQ ID NO: 5446 - protein, 113 aa, Artificial Sequence
  source: /note="Description of Artificial Sequence: Synthetic light chain variable domain"
DIMMSQSPSSLAVSVGEKFTMTCKSSQSLFFGSTQKNYLAWYQQKPGQSPKLLIYWASTRESGVPDRFTGSGSGTDFTLAISSVMPEDLAVYYCQQYYNYPWTFGGGTKLEIK

SEQ ID NO: 5447 - protein, 111 aa, Artificial Sequence
  source: /note="Description of Artificial Sequence: Synthetic light chain variable domain"
DIVLTQSPASLAVSLGQRATISCKASQSVDFDGDSFMNWYQQKPGQPPKLLIYTTSNLESGIPARFSASGSGTDFTLNIHPVEEEDTATYYCQQSNEDPYTFGGGTKLEIK

SEQ ID NO: 5448 - protein, 108 aa, Artificial Sequence
  source: /note="Description of Artificial Sequence: Synthetic light chain variable domain"
DIQMTQTTSSLSASLGDRVTISCRASQDISNYLNWYQQKPDGTVKLLIYYTSILHSGVPSRFSGSGSGTDYSLTISNLEQEDFATYFCQQGNTLPWTFGGGTKLEIKA

SEQ ID NO: 5449 - protein, 110 aa, Artificial Sequence
  source: /note="Description of Artificial Sequence: Synthetic light chain variable domain"
EIVLTQSPATLSLSPGERATLSCGASQSVSSSYLAWYQQKPGQAPRLLIYDASSRATGIPARFSGSGSGTDFTLTISSLEPEDFAVYYCQQRSSWPPTWTFGQGTKLEIK

SEQ ID NO: 5450 - protein, 109 aa, Artificial Sequence
  source: /note="Description of Artificial Sequence: Synthetic light chain variable domain"
EIVLTQSPGTLSLSPGERATLSCRASQSVGGYLAWYQQKPGQAPRLLIYDASNRATGIPARFSGSGSGTDFTLTISSLEPEDFAVYYCQQRNNWPPMYTFGQGTKLEIK

SEQ ID NO: 5451 - protein, 108 aa, Artificial Sequence
  source: /note="Description of Artificial Sequence: Synthetic light chain variable domain"
DIQMTQSPASLSVSVGETVTITCRTNENIYSNLAWYQQKQGKSPQLLIYAATHLVEGVPSRFSGSGSGTQYSLKITSLQSEDFGNYYCQHFWGTPCTFGGGTKLEIKR

SEQ ID NO: 5452 - protein, 214 aa, Artificial Sequence
  source: /note="Description of Artificial Sequence: Synthetic light chain variable domain"
EIVLTQSPATLSLSPGERATLSCRASQGVSSYLAWYQQKPGQAPRLLIYDASNRATGIPARFSGSGPGTDFTLTISSLEPEDFAVYYCQQRSNWHLTFGGGTKVEIKRTVAAPSVFIFPPSDEQLKSGTASVVCLLNNFYPREAKVQWKVDNALQSGNSQESVTEQDSKDSTYSLSSTLTLSKADYEKHKVYACEVTHQGLSSPVTKSFNRGEC

SEQ ID NO: 5453 - protein, 214 aa, Artificial Sequence
  source: /note="Description of Artificial Sequence: Synthetic light chain variable domain"
DIQMTQSPSSLSASVGDRVTITCRASQGISSWLAWYQQKPEKAPKSLIYAASSLQSGVPSRFSGSGSGTDFTLTISSLQPEDFATYYCQQYNSYPLTFGGGTKVEIKRTVAAPSVFIFPPSDEQLKSGTASVVCLLNNFYPREAKVQWKVDNALQSGNSQESVTEQDSKDSTYSLSSTLTLSKADYEKHKVYACEVTHQGLSSPVTKSFNRGEC

SEQ ID NO: 5454 - protein, 214 aa, Artificial Sequence
  source: /note="Description of Artificial Sequence: Synthetic light chain variable domain"
EIVLTQSPGTLSLSPGERATLSCRASQSVSSYLAWYQQKPGQAPRLLIYGASSRATGIPDRFSGSGSGTDFTLTISRLEPEDFAVYYCQQYGSSPLTFGGGTKVEIKRTVAAPSVFIFPPSDEQLKSGTASVVCLLNNFYPREAKVQWKVDNALQSGNSQESVTEQDSKDSTYSLSSTLTLSKADYEKHKVYACEVTHQGLSSPVTKSFNRGEC

SEQ ID NO: 5455 - protein, 214 aa, Artificial Sequence
  source: /note="Description of Artificial Sequence: Synthetic light chain variable domain"
DIQMTQSPSSLSASVGDRVTFTCRASQGISSWLAWYQQKPEKAPKSLIYAASSLQSGVPSRFSGSGSGTDFTLTISSLQPEDFATYYCQQYNSYPPTFGQGTKVEIKRTVAAPSVFIFPPSDEQLKSGTASVVCLLNNFYPREAKVQWKVDNALQSGNSQESVTEQDSKDSTYSLSSTLTLSKADYEKHKVYACEVTHQGLSSPVTKSFNRGEC

SEQ ID NO: 5456 - protein, 213 aa, Artificial Sequence
  source: /note="Description of Artificial Sequence: Synthetic light chain variable domain"
AIQLTQSPSSLSASVGDRVTITCRASQGISSALAWYQQKPGKAPKLLIYDASSLESGVPSRFSGSGSGTDFTLTISSLQPEDFATYYCQQFNSYPTFGGGTKVEIKRTVAAPSVFIFPPSDEQLKSGTASVVCLLNNFYPREAKVQWKVDNALQSGNSQESVTEQDSKDSTYSLSSTLTLSKADYEKHKVYACEVTHQGLSSPVTKSFNRGEC

SEQ ID NO: 5457 - protein, 214 aa, Artificial Sequence
  source: /note="Description of Artificial Sequence: Synthetic light chain variable domain"
AIQLTQSPSSLSASVGDRVTITCRASQGISSALAWYQQKPGKAPKLLIYDASSLESGVPSRFSGSGSGTDFTLTISSLQPEDFATYYCQQFSSYPRTFGQGTKVEIKRTVAAPSVFIFPPSDEQLKSGTASVVCLLNNFYPREAKVQWKVDNALQSGNSQESVTEQDSKDSTYSLSSTLTLSKADYEKHKVYACEVTHQGLSSPVTKSFNRGEC

SEQ ID NO: 5458 - protein, 214 aa, Artificial Sequence
  source: /note="Description of Artificial Sequence: Synthetic light chain variable domain"
DIQMTQSPSSLSASVGDRVTITCRASQGISSWLAWYQQKPEKAPKSLIYAASSLQSGVPSRFSGSGSGTGFTLTISSLQPEDFATYYCQQYNSYPRTFGQGTKVEIKRTVAAPSVFIFPPSDEQLKSGTASVVCLLNNFYPREAKVQWKVDNALQSGNSQESVTEQDSKDSTYSLSSTLTLSKADYEKHKVYACEVTHQGLSSPVTKSFNRGEC

SEQ ID NO: 5459 - protein, 214 aa, Artificial Sequence
  source: /note="Description of Artificial Sequence: Synthetic light chain variable domain"
EIVLTQSPGTLSLSPGERATLSCRASQSVSSSYLAWYQQKPGQAPRLLIYGASSRATGIPDRFSGSGSGTDFTLTISRLEPEDFAVYYCQHYGSSFTFGPGTKVDIKRTVAAPSVFIFPPSDEQLKSGTASVVCLLNNFYPREAKVQWKVDNALQSGNSQESVTEQDSKDSTYSLSSTLTLSKADYEKHKVYACEVTHQGLSSPVTKSFNRGEC

SEQ ID NO: 5460 - protein, 214 aa, Artificial Sequence
  source: /note="Description of Artificial Sequence: Synthetic light chain variable domain"
DIQMTQSPSSLSASVGDRVTITCRASQYISSWLAWYQQKPEKAPKSLIYAASSLQSGVPSRFSGSGSGTDFTLTISSLQPEDFATYYCQQYHSYPPTFGQGTRLEIKRTVAAPSVFIFPPSDEQLKSGTASVVCLLNNFYPREAKVQWKVDNALQSGNSQESVTEQDSKDSTYSLSSTLTLSKADYEKHKVYACEVTHQGLSSPVTKSFNRGEC

SEQ ID NO: 5461 - protein, 111 aa, Artificial Sequence; identical to SEQ ID NO: 3759
  source: /note="Description of Artificial Sequence: Synthetic light chain variable domain"

SEQ ID NO: 5462 - protein, 113 aa, Artificial Sequence
  source: /note="Description of Artificial Sequence: Synthetic light chain variable domain"
DIQLTQTPLSLPVSLGDQASISCRSSQSLVHRNGNTYLHWYLQKPGQSPKLLIYTVSNRFSGVPDRFSGSGSGTDFTLKISRVEAEDLGLYFCSQSSHVPPTFGAGTKLEIKR

SEQ ID NO: 5463 - protein, 111 aa, Artificial Sequence; identical to SEQ ID NO: 3755
  source: /note="Description of Artificial Sequence: Synthetic light chain variable domain"

SEQ ID NO: 5464 - protein, 113 aa, Artificial Sequence; identical to SEQ ID NO: 3757
  source: /note="Description of Artificial Sequence: Synthetic light chain variable domain"

SEQ ID NO: 5465 - protein, 107 aa, Artificial Sequence; identical to SEQ ID NO: 3964
  source: /note="Description of Artificial Sequence: Synthetic light chain variable domain"

SEQ ID NO: 5466 - protein, 108 aa, Artificial Sequence; identical to SEQ ID NO: 3965
  source: /note="Description of Artificial Sequence: Synthetic light chain variable domain"

SEQ ID NO: 5467 - protein, 240 aa, Artificial Sequence
  source: /note="Description of Artificial Sequence: Synthetic light chain variable domain"
EIKLTQSPSILSVSPGETVTLSCRASQTIYKNLHWYQQKSHRSPRLLIKYGSDSISGIPARFSGSGSGTDYTLTINSVKPEDEGIYYCLQGYSTPWTFGQGTKLEIKRTVAAPSVFIFPPSDEQLKSGTASVVCLLNNFYPREAKVQWKVDNALQSGNSQESVTEQDSKDSTYSLSSTLTLSKADPGVRDRAGLQGLHLLPSSTLTLSKADYEKHKVYACEVTHQGLSSPVTKSFNRGEC

SEQ ID NO: 5468 - protein, 214 aa, Artificial Sequence
  source: /note="Description of Artificial Sequence: Synthetic light chain variable domain"
EIVLTQSPATLSVSPGETVTLSCRASQTIYKNLHWYQQKSGLSPRLLIKYGSDSISGIPARFSGSGSGTDYTLTINSVEPEDEGIYYCLQGYSTPWTFGQGTKLEIKRTVAAPSVFIFPPSDEQLKSGTASVVCLLNNFYPREAKVQWKVDNALQSGNSQESVTEQDSKDSTYSLSSTLTLSKADYEKHKVYACEVTHQGLSSPVTKSFNRGEC

SEQ ID NO: 5469 - protein, 107 aa, Artificial Sequence; identical to SEQ ID NO: 4664
  source: /note="Description of Artificial Sequence: Synthetic light chain variable domain"

SEQ ID NO: 5470 - protein, 108 aa, Artificial Sequence; identical to SEQ ID NO: 4661
  source: /note="Description of Artificial Sequence: Synthetic light chain variable domain"

SEQ ID NO: 5471 - protein, 107 aa, Artificial Sequence [sequence omitted]

SEQ ID NO: 5472 - protein, 112 aa, Artificial Sequence
  source: /note="Description of Artificial Sequence: Synthetic light chain variable domain"
DVVMTQTPLSLPVSLGDQASISCRSSQSLVHSNGNTYLHWYLQKPGQSPKLLIYKVSNRFSGVPDRFSGSGSGTDFTLKISRVEAEDLGVYFCSQNTHVPPTFGSGTKLEIK

SEQ ID NO: 5473 - protein, 107 aa, Artificial Sequence; identical to SEQ ID NO: 5039
  source: /note="Description of Artificial Sequence: Synthetic light chain variable domain"

SEQ ID NO: 5474 - protein, 247 aa, Artificial Sequence
  source: /note="Description of Artificial Sequence: Synthetic single chain variable fragment"
MAQVQLVQSGAEVKEPGSSVKVSCKASGGTFSSYAIYWVRQAPGQGLEWMGWINPDSGDTNSAQQFQGRVTMTRDTSISTAYMELSRLRSDDTAMYYCARPPRGDGPDYWGQGTLVTVSSGGGGGSEIVLTQSPGTLSLSPGERATLSCRASQSVSSSYLAWYQQKPGQAPRLLIYGASSRATGIPDRFSGSGSGTDFTLTISRLEPEDFAVYYCQQYGSSPRTFGQGTKVDIKRGLGGLVDYKDDD

SEQ ID NO: 5475 - protein, 261 aa, Artificial Sequence [sequence omitted]

SEQ ID NO: 5476 - protein, 249 aa, Artificial Sequence
  source: /note="Description of Artificial Sequence: Synthetic single chain variable fragment"
MAQVQLVQSGAEVKEPGSSVKVSCKASGGTFSSYAIYWVRQAPGQGLEWMGWINPDSGDTNSAQQFQGRVTMTRDTSISTAYMELSRLRSDDTAMYYCARPPRGDGPDYWGQGTLVTVSSGGGGGSEIVLTQSPGTLSLSPGERATLSCRASQSVSSSYLAWYQQKPGQAPRLLIYGASSRATGIPDRFSGSGSGTDFTLTISRLEPEDFAVYYCQQYGSSPRTFGQGTKVDIKRGLGGLVDYKDDDDK

SEQ ID NO: 5477 - protein, 258 aa, Artificial Sequence
  source: /note="Description of Artificial Sequence: Synthetic single chain variable fragment"
DIQMTQSPSSLSASVGDRVTITCRASQGIRNYLAWYQQKPGKAPKLLIYAASTLQSGVPSRFSGSGSGTDFTLTISSLQPEDVATYYCQRYNRAPYTFGQGTKVEIKRGSTSGSGKPGSGEGSTKGEVQLVESGGGLVQPGRSLRLSCAASGFTFDDYAMHWVRQAPGKGLEWVSAITWNSGHIDYADSVEGRFTISRDNAKNSLYLQMNSLRAEDTAVYYCAKVSYLSTASSLDYWGQGTLVTVSSGGGGSGGGGSC

SEQ ID NO: 5478 - protein, 258 aa, Artificial Sequence; identical to SEQ ID NO: 5477
  source: /note="Description of Artificial Sequence: Synthetic single chain variable fragment"

SEQ ID NO: 5479 - protein, 246 aa, Artificial Sequence
  source: /note="Description of Artificial Sequence: Synthetic single chain variable fragment"
DVKLQESGPGLVAPSQSLSITCTVSGFSLTSYAVSWVRQPPGKGLEWLGIIWSGGATNYNSALKSRLSISKDNSKSQVFLKMNGLQTDDTARYYCAREHYYGSSAMDYWGQGASITVSSGGGGSGGGGSGGGGSGIVMTQSPLSLPVSLGDQASISCRSSQSIVHSYGNTYLFWYLQKPGQSPKLLIYRVSNRFSGVPDRFSGSGSGTNFTLKISRVEAEDMGVYYCFQGTHVPYTFGGGTKLEIK

SEQ ID NO: 5480 - protein, 246 aa, Artificial Sequence
  source: /note="Description of Artificial Sequence: Synthetic single chain variable fragment"
QVQLQQSGAELVKPGASVKISCKASGYAFSSYWMNWVKQRPGKGLEWIGQIYPGDGDTTYNGKFKGKATLTADKSSSTVYMQLNSLTSEDSAVYFCVRYYYGSSGYFDYWGQGTTLTVSSGGGGSGGGGSGGGGSDVQMIQTPDSLAVSLGQRATISCRASESVDNYGISFMHWYQQKPGQSPKLLIYRASNLESGIPARFSGSGSRTDFTLTINPVETDDVATYYCQQNNKDPPTFGGGTKLEIK

SEQ ID NO: 5481 - protein, 245 aa, Artificial Sequence
  source: /note="Description of Artificial Sequence: Synthetic single chain variable fragment"
DVQLQESGPVLVKTGASVKMSCTASGYTFTDHFMDWVKQSHGKSLEWIGSLNPYSGGTSYNQKFKGKATLTVDKSSSTAYMELNSLTSVDSAVYYCARHNWGAYFDYWGQGTTLTVSSGGGGSGGGGSGGGGSDIVMTQAAPSVPVTPGESVSISCRSSKSLLHSNGNTYLYWFLQRPGQSPQRLIYYMSNLASGVPDRFSGRGSGTDFTLRISRVEAEDVGVYYCMQGLEDPYTFGGGTKLEIK

SEQ ID NO: 5482 - protein, 242 aa, Artificial Sequence
  source: /note="Description of Artificial Sequence: Synthetic single chain variable fragment"
ALQLQQSGAELVRPGASVTLSCKASGYTFTDYEMHWVKQTPVHGLEWIGAIDPETGGTAYNQKFEGKAILTADKSSSTAYMELRSLTSEDSPVYYCARRRYYGSSSFDYWGQGTTLTVSSGGGGSGGGGSGGGGSDVQMIQTPSSLSASLGDRVTISCRASQDIGNYLNWYQQKPDGTVKLLIYYTSRLHSGVPSRFSGSGSGTEYSLTISNLEQEDIATYFCQQGSALPPTFGGGTKLEIN

SEQ ID NO: 5483 - protein, 248 aa, Artificial Sequence
  source: /note="Description of Artificial Sequence: Synthetic single chain variable fragment"
QVQLQQSGAEVKKPGSSVKVSCKASGFSLTSYAISWVRQAPGQGLEWMGGIIWSGGATNYAQKFQGRVTITADESTSTAYMELSSLRSEDTAVYYCAREHYYGSSAMDYWWGQGTMVTVSSGGGGSGGGGSGGGGSEIVLTQSPATLSLSPGERATLSCRASQSIVHSYGNTYAWYQQKPGQAPRLLIYRVSRATGIPARFSGSGSGTDFTLTISSLEPEDFAVYYCFQGTHVPYTFFGQGTKLEIKR

SEQ ID NO: 5484 - protein, 247 aa, Artificial Sequence
  source: /note="Description of Artificial Sequence: Synthetic single chain variable fragment"
QVQLQQSGAEVKKPGSSVKVSCKASGYAFSSYISWVRQAPGQGLEWMGGQIYPGDGDTNYAQKFQGRVTITADESTSTAYMELSSLRSEDTAVYYCVRYYYGSSGYFDYWWGQGTMVTVSSGGGGSGGGGSGGGGSEIVLTQSPATLSLSPGERATLSCRASESVDNYGISFAWYQQKPGQAPRLLIYRASRATGIPARFSGSGSGTDFTLTISSLEPEDFAVYYCQQNNKDPPTFFGQGTKLEIKR

SEQ ID NO: 5485 - protein, 246 aa, Artificial Sequence
  source: /note="Description of Artificial Sequence: Synthetic single chain variable fragment"
QVQLQQSGAEVKKPGSSVKVSCKASGYTFTDHFISWVRQAPGQGLEWMGGLNPYSGGTNYAQKFQGRVTITADESTSTAYMELSSLRSEDTAVYYCARHNWGAYFDYWWGQGTMVTVSSGGGGSGGGGSGGGGSEIVLTQSPATLSLSPGERATLSCRASKSLLHSNGNTYAWYQQKPGQAPRLLIYYMSRATGIPARFSGSGSGTDFTLTISSLEPEDFAVYYCMQGLEDPYTFFGQGTKLEIKR

SEQ ID NO: 5486 - protein, 246 aa, Artificial Sequence; identical to SEQ ID NO: 5479
  source: /note="Description of Artificial Sequence: Synthetic single chain variable fragment"

SEQ ID NO: 5487 - protein, 246 aa, Artificial Sequence; identical to SEQ ID NO: 5480
  source: /note="Description of Artificial Sequence: Synthetic single chain variable fragment"

SEQ ID NO: 5488 - protein, 245 aa, Artificial Sequence; identical to SEQ ID NO: 5481
  source: /note="Description of Artificial Sequence: Synthetic single chain variable fragment"

SEQ ID NO: 5489 - protein, 242 aa, Artificial Sequence; identical to SEQ ID NO: 5482
  source: /note="Description of Artificial Sequence: Synthetic single chain variable fragment"

SEQ ID NO: 5490 - protein, 248 aa, Artificial Sequence; identical to SEQ ID NO: 5483
  source: /note="Description of Artificial Sequence: Synthetic single chain variable fragment"

SEQ ID NO: 5491 - protein, 247 aa, Artificial Sequence; identical to SEQ ID NO: 5484
  source: /note="Description of Artificial Sequence: Synthetic single chain variable fragment"

SEQ ID NO: 5492 - protein, 246 aa, Artificial Sequence; identical to SEQ ID NO: 5485
  source: /note="Description of Artificial Sequence: Synthetic single chain variable fragment"

SEQ ID NO: 5493 - protein, 243 aa, Artificial Sequence
  source: /note="Description of Artificial Sequence: Synthetic single chain variable fragment"
QVQLQQSGAEVKKPGSSVKVSCKASGYTFTDYEISWVRQAPGQGLEWMGGIDPETGGTNYAQKFQGRVTITADESTSTAYMELSSLRSEDTAVYYCARRRYYGSSSFDYWWGQGTMVTVSSGGGGSGGGGSGGGGSEIVLTQSPATLSLSPGERATLSCRASQDIGNYAWYQQKPGQAPRLLIYYTSRATGIPARFSGSGSGTDFTLTISSLEPEDFAVYYCQQGSALPPTFFGQGTKLEIKR

SEQ ID NO: 5494 - protein, 242 aa, Artificial Sequence
  source: /note="Description of Artificial Sequence: Synthetic single chain variable fragment"
QVQLQQSGAEVKKPGSSVKVSCKASGYTFTDYEISWVRQAPGQGLEWMGGIDPETGGTNYAQKFQGRVTITADESTSTAYMELSSLRSEDTAVYYCARRYYGSSSFDYWWGQGTMVTVSSGGGGSGGGGSGGGGSEIVLTQSPATLSLSPGERATLSCRASQDIGNYAWYQQKPGQAPRLLIYYTSRATGIPARFSGSGSGTDFTLTISSLEPEDFAVYYCQQGSALPPTFFGQGTKLEIKR

SEQ ID NO: 5495 - protein, 200 aa, Artificial Sequence
  source: /note="Description of Artificial Sequence: Synthetic single chain variable fragment"
  MOD_RES (3)..(5): Any amino acid
  MOD_RES (170)..(171): Any amino acid
QVXXXQSGAEVVKPGASVKLSCKTSGYTFTNYDINWVRQRPGQGLEWIGWIFPGDGSTQYNEKFKGKATLTTDTSTSTAYLELSSLGSEDTAVYFCARQTTGTWFAYWGQGTLVTVSSGGGGSGGGGSGGGGSEIVMTQSPATLSVSPGERVTLSCRASQSISDYLYWYXXKSHESPRLLIKYASQSISGIPARFSGSGS

SEQ ID NO: 5496 - protein, 200 aa, Artificial Sequence
  source: /note="Description of Artificial Sequence: Synthetic single chain variable fragment"
  MOD_RES (2)..(5): Any amino acid
QXXXXQSGAEVVKPGASVKLSCKTSGYTFTNYDINWVRQRPGQGLEWIGWIFPGDGSTQYNEKFKGKATLTTDTSTSTAYMELSSLRSEDTAVYFCARQTTATWFAYWGQGTLVTVSSGGGGSGGGGSGGVGSEIVMTQSPATLSVSPGERVTLSCRASQSIGDYLYWYQQKSHESPRLLIKYASQSISGIPARFSGSGS

SEQ ID NO: 5497 - protein, 200 aa, Artificial Sequence
  source: /note="Description of Artificial Sequence: Synthetic single chain variable fragment"
  MOD_RES (3)..(5): Any amino acid
QVXXXQSGAEVVKPGASVKLSCKTSGYTFTNYDINWVRQRPGQGLEWIGWIFPGDDSTQYNEKFKGKATLTTDTSTSTAYMELSSLRSEDTAVYFCARQTTGTWFAYWGQGTLVTVSSGGGGSGGGGSGGGGSEIVMTQSPATLSVSPGERVTLSCRASQSISDYLYWYQQKSHESPRLLIKYASQSIPGIPARFSGSGS

SEQ ID NO: 5498 - protein, 200 aa, Artificial Sequence
  source: /note="Description of Artificial Sequence: Synthetic single chain variable fragment"
  MOD_RES (3)..(3): Any amino acid
  MOD_RES (5)..(5): Any amino acid
QVXLXQSGAEVVKPGASVKLSCKTSGYTFTNYDINWVRQRPGQGLEWIGWIFPGDGSTQYNEKFKGKATLTTDTSTSTAYMELSSLRSEDTAVYFCARQTTATWFAYWGQGTLVTVSSGGGGSGGGGSGGGGSEIVMTQSPATLSVSPGERVTLSCRASQSISDYLYWYQQKSHESPRLLIKYASQSISGIPARFSGSGS

SEQ ID NO: 5499 - protein, 200 aa, Artificial Sequence
  source: /note="Description of Artificial Sequence: Synthetic single chain variable fragment"
  MOD_RES (3)..(3): Any amino acid
QVXLVQSGAEVVKPGASVKLSCKTSGYTFTNYDINWVRQRPGQGLEWIGWIFPGDGSTQYNEKFKGKATLTTDTSTSTAYMELSSLGSEDTAVYFCTRQTTATWFAYWGQGTLVTVSSGGGGSGGGGSSGGGSEIVMTQSPATLSVSPGERVTLSCRASQSIGDYLYWYQQKSHESPRLLIKYASQSISGIPARFSGSGS

SEQ ID NO: 5500 - protein, 200 aa, Artificial Sequence
  source: /note="Description of Artificial Sequence: Synthetic single chain variable fragment"
  MOD_RES (3)..(3): Any amino acid
  MOD_RES (5)..(5): Any amino acid
QVXLXQSGAEVVKPGASVKLSCKTSGYTFTNYDINWVRQRPGQGLEWIGWIFPGDGSTQYNEKFKGKATLTTDTSTSTAYLELSSLGSEDTAVYFCARQTTGTWFAYWGQGTLVTVSSGGGGSGGGGSGGGGSEIVMTQSPATLSVSPGERVTLSCRASQSISDYLYWYQQKSHESPRLLIKYASQSISGIPARFSGSGS

SEQ ID NO: 5501 - protein, 241 aa, Artificial Sequence
  source: /note="Description of Artificial Sequence: Synthetic single chain variable fragment"
QVQLVQSGAEVVKPGASVKLSCKASGYTFTNYDINWVRQRPEQGLEWIGWIFPGDGSTQYNEKFKGKATLTTDTSTSTAYMELSSLRSEDTAVYFCARQTTATWFAYWGQGTLVTVSSGGGGSGGGGSGGGGSEIVMTQSPATLSVSPGERVSLSCRASQSISDYLHWYQQKSHESPRLLIKYASQSISGIPARFSGSGSGSEFTLTINSVEPEDVGVYYCQNGHSFPLTFGQGTKLELKR

SEQ ID NO: 5502 - protein, 241 aa, Artificial Sequence
  source: /note="Description of Artificial Sequence: Synthetic single chain variable fragment"
QVQLVQSGAEVVKPGASVKLSCKTSGYTFTNYDINWVRQRPGQGLEWIGWIFPGDGSTQYNEKFKGKATLTTDTSTSTAYMELSSLRSEDTAVYFCARQTTATWFAYWGQGTLVTVSSGGGGSGGGGSGGGGSEIVMTQSPATLSVSPGERVTLSCRASQSISDYLYWYQQKSHESPRLLIKYASQSISGIPARFSGSGSGSEFTLTINSVEPEDVGVYYCQNGHSFPLTFGQGTKLELKR

SEQ ID NO: 5503 - protein, 241 aa, Artificial Sequence
  source: /note="Description of Artificial Sequence: Synthetic single chain variable fragment"
QVQLVQSGAEVVKPGASCKLSCKTSGYTFTNYDINWVRQRPGQGLEWIGWIFPGDGSTQYNEKFKGKATLTTDTSTSTAYMELSSLRSEDTAVYFCARQTTATWFAYWGQGTLVTVSSGGGGSGGGGSGGVGSEIVMTQSPATLSVSPGERVTLSCRASQSIGDYLYWYQQKSHESPRLLIKYASQSISGIPARFSGSGSGSEFTLTINSVEPEDVGVYYCQNGHSFPLTFGQGTKLELKR

SEQ ID NO: 5504 - protein, 241 aa, Artificial Sequence
  source: /note="Description of Artificial Sequence: Synthetic single chain variable fragment"
QVQLVQSGAEVVKPGASVKLSCKTSGYTFTNYDINWVRQRPGQGLEWVGWIFPGDGSTQYNEKFKGKATLTTDTSTSTAYMELSSLRSEDTAVYFCARQTTSTWFAYWGQGTLVTVSSGGGGSGGGGSGGGGSEIVMTQSPATLSVSPGERVTLSCRASQPISDYLYWYQQKSHESPRLLIKYASQSISGIPARFSGSGSGSEFTLTINSVEPEDVGVYYCQNGYSFPLTFGQGTKLELKR

SEQ ID NO: 5505 - protein, 241 aa, Artificial Sequence
  source: /note="Description of Artificial Sequence: Synthetic single chain variable fragment"
QVQLVQSGAEVVKPGASVKLSCKTSGYTFTNYDINWVRQRPGQGLEWIGWIFPGDDSTQYNEKFKGKATLTTDTSTSTAYMELSSLRPEDTAVYFCARQTTGTWFAYWGQGTLVTVSSGGGGSGGGGSGGGGSEIVMTQSPATLSVSPGERVTLSCRASQSISDYLYWYQQKSHESPRLLIKYASQSIPGIPARFSGSGSGSEFTLTINSVEPEDVGVYYCQNGHSFPLTFGQGTKLELKR

SEQ ID NO: 5506 - protein, 241 aa, Artificial Sequence
  source: /note="Description of Artificial Sequence: Synthetic single chain variable fragment"
QVQLVQSGAEVVKPGASVKLSCKTSGYTFTNYDINWVRQRPGQGLEWIGWIFPGDGSTQYNEKFKGKATLTTDTSTSTAYMELSSLGSEDTAVYFCTRQTTATWFAYWGQGTLVTVSSGGGGSGGGGSSGGGSEIVMTQSPATLSVSPGERVTLSCRASQSIGDYLYWYQQKSHESPRLLIKYASQSISGIPARFSGSGSGSEFTLTINSVEPEDVGVYYCQNGHSFPLTFGQGTKLELKR

SEQ ID NO: 5507 - protein, 241 aa, Artificial Sequence
  source: /note="Description of Artificial Sequence: Synthetic single chain variable fragment"
QVQLVQSGAEVVKPGASVKLSCKTSGYTFTNYDINWVRQRPGQGLEWIGWIFPGDGSTQYNEKFKGKATLTTDTSTSTAYLELSSLGSEDTAVYFCARQTTGTWFAYWGQGTLVTVSSGGGGSGGGGSGGGGSEIVMTQSPATLSVSPGERVTLSCRASQSISDYLYWYQQKSHESPRLLIKYASQSISGIPARFSGSGSGSEFTLTINSVEPEDVGVYYCQNGHSFPLTFGQGTKLELKR

SEQ ID NO: 5508 - protein, 241 aa, Artificial Sequence
  source: /note="Description of Artificial Sequence: Synthetic single chain variable fragment"
QVQLVQSGAEVVKPGASVKLSCKTSGYTFTNYDINWVRQRPGQGLEWIGWIFPGDDSTQYNEKFKGKATLTTDTSTSTAYMELSSLRSEDTAVYFCARQTTGTWFAYWGQGTLVTVSSGGGGSGGGGSGGGGSEIVMTQSPATLSVSPGERVTLSCRASQSISDYLYWYQQKSHESPRLLIKYASQSISGIPARFSGSGSGSEFTLTINSVEPEDVGVYYCQNGHSFPLTFGQGTKLELKR

SEQ ID NO: 5509 - protein, 241 aa, Artificial Sequence
  source: /note="Description of Artificial Sequence: Synthetic single chain variable fragment"
QVQLVQSGAEVVKPGASVKVSCKASGYTFTNYDINWVRQRPEQGLEWIGWIFPGDGSTQYNEKFKGRVTMTTDTSTSTVYMELSSLRSEDTAVYFCARQTTATWFAYWGQGTLVTVSSGGGGSGGGGSGGGGSEIVMTQSPATLSVSPGERVTLSCRASQSISDYLHWYQQKSHQAPRLLIKYASQSISGIPARFSGSGSGSEFTLTISSLQPEDFGVYYCQNGHSFPLTFGQGTKLELKR

SEQ ID NO: 5510 - protein, 241 aa, Artificial Sequence
  source: /note="Description of Artificial Sequence: Synthetic single chain variable fragment"
QVQLVQSGAEVVKPGASVKVSCKTSGYTFTNYDINWVRQRPGQGLEWIGWIFPGDDSTQYNEKFKGRVTMTTDTSTSTVYMELSSLRSEDTAVYFCARQTTGTWFAYWGQGTLVTVSSGGGGSGGGGSGGGGSEIVMTQSPATLSVSPGERVTLSCRASQSISDYLYWYQQKSHQAPRLLIKYASQSISGIPARFSGSGSGSEFTLTISSLQPEDFGVYYCQNGHSFPLTFGQGTKLELKR

SEQ ID NO: 5511 - protein, 241 aa, Artificial Sequence
  source: /note="Description of Artificial Sequence: Synthetic single chain variable fragment"
QVQLQQSGAELVKPGASVKLSCKTSGYTFTNYDINWVRQRPGQGLEWIGWIFPGDDSTQYNEKFKGKATLTTDTSSSTAYMQLSRLTSEDSAVYFCARQTTGTWFAYWGQGTLVTVSAGGGGSGGGGSGGGGSDIVMTQSPATLSVTPGDRVTLSCRASQSISDYLYWYQQKSHESPRLLIKYASQSISGIPSRFSGSGSGSDFTLSINSVEPEDVGVYYCQNGHSFPLTFGAGTKLELKR

SEQ ID NO: 5512 - protein, 200 aa, Artificial Sequence
  source: /note="Description of Artificial Sequence: Synthetic single chain variable fragment"
QVQLVQSGAEVVKPGASVKLSCKASGYTFTNYDINWVRQRPEQGLEWIGWIFPGDGSTQYNEKFKGKATLTTDTSTSTAYMELSSLRSEDTAVYFCARQTTATWFAYWGQGTLVTVSSGGGGSGGGGSGGGGSEIVMTQSPATLSVSPGERVSLSCRASQSISDYLHWYQQKSHESPRLLIKYASQSISGIPARFSGSGS

SEQ ID NO: 5513 - protein, 200 aa, Artificial Sequence
  source: /note="Description of Artificial Sequence: Synthetic single chain variable fragment"
QVQLVQSGAEVVKPGASVKLSCKTSGYTFTNYDINWVRQRPGQGLEWIGWIFPGDGSTQYNEKFKGKATLTTDTSTSTAYMELSSLRSEDTAVYFCARQTTATWFAYWGQGTLVTVSSGGGGSGGGGSGGGGSEIVMTQSPATLSVSPGERVTLSCRASQSISDYLYWYQQKSHESPRLLIKYASQSISGIPARFSGSGS

SEQ ID NO: 5514 - protein, 200 aa, Artificial Sequence
  source: /note="Description of Artificial Sequence: Synthetic single chain variable fragment"
  MOD_RES (3)..(4): Any amino acid
  MOD_RES (18)..(18): Any amino acid
QVXXVQSGAEVVKPGASXKLSCKTSGYTFTNYDINWVRQRPGQGLEWIGWIFPGDGSTQYNEKFKGKATLTTDTSTSTAYMELSSLRSEDTAVYFCARQTTATWFAYWGQGTLVTVSSGGGGSGGGGSGGVGSEIVMTQSPATLSVSPGERVTLSCRASQSIGDYLYWYQQKSHESPRLLIKYASQSISGIPARFSGSGS

SEQ ID NO: 5515 - protein, 200 aa, Artificial Sequence
  source: /note="Description of Artificial Sequence: Synthetic single chain variable fragment"
  MOD_RES (3)..(3): Any amino acid
QVXLVQSGAEVVKPGASVKLSCKTSGYTFTNYDINWVRQRPGQGLEWIGWIFPGDGSTQYNEKFKGKATLTTDTSTSTAYLELSSLGSEDTAVYFCARQTTGTWFAYWGQGTLVTVSSGGGGSGGGGSGGGGSEIVMTQSPATLSVSPGERVTLSCRASQSISDYLYWYQQKSHESPRLLIKYASQSISGIPARFSGSGS

SEQ ID NO: 5516 - protein, 200 aa, Artificial Sequence
  source: /note="Description of Artificial Sequence: Synthetic single chain variable fragment"
  MOD_RES (3)..(3): Any amino acid
QVXLVQSGAEVVKPGASVKLSCKTSGYTFTNYDINWVRQRPGQGLEWIGWIFPGDGSTQYNEKFKGKATLTTDTSTSTAYMELSSLRSEDTAVYFCARQTTATWFAYWGQGTLVTVSSGGGGSGGGGSGGVGSEIVMTQSPATLSVSPGERVTLSCRASQSIGDYLYWYQQKSHESPRLLIKYASQSISGIPARFSGSGS

SEQ ID NO: 5517 - protein, 200 aa, Artificial Sequence
  source: /note="Description of Artificial Sequence: Synthetic single chain variable fragment"
QVQLVQSGAEVVKPGASVKLSCKTSGYTFTNYDINWVRQRPGQGLEWIGWIFPGDGSTQYNEKFKGKATLTTDTSTSTAYMELSSLGSEDTAVYFCARQTTATWFAYWGQGTLVTVSSGGGGSGGGGSGGGGSEIVMTQSPATLSVSPGERVTLSCRASQSISDYLYWYQQKSHESPRLLIKYASQSISGIPARFSGSGS

SEQ ID NO: 5518 - protein, 200 aa, Artificial Sequence
  source: /note="Description of Artificial Sequence: Synthetic single chain variable fragment"
  MOD_RES (3)..(3): Any amino acid
QVXLVQSGAEVVKPGASVKLSCKASGYTFTNYDINWARQRPGQGLEWIGWIFPGDGSTQYNEKFKGKATLTTDTSTGTAYMELSSLRSEDTAVYFCARQTTATWFAYWGQGTVVTVSSGGGGSGGGGSGGGGNEIVMTQSPATLSVSPGERVTLSCRASQSISDYVYWYQQKPHESPRLLIKYASQSISGIPARFSGSGS

SEQ ID NO: 5519 - protein, 200 aa, Artificial Sequence; identical to SEQ ID NO: 5500
  source: /note="Description of Artificial Sequence: Synthetic single chain variable fragment"
  MOD_RES (3)..(3): Any amino acid
  MOD_RES (5)..(5): Any amino acid

SEQ ID NO: 5520 - protein, 200 aa, Artificial Sequence
  source: /note="Description of Artificial Sequence: Synthetic single chain variable fragment"
QVQLVQSGAEVVKPGASVKLSCKTSGYTFTNYDINWVRQRPGQGLEWIGWIFPGDGSTQYNEKFKGKATLTTDTSTSTAYMELSSLSSEDTAVYFCARQTTATWFAYWGQGTLVTVSSGGGGSGGGGSGGGGSEIVMTQSPATLSVSPGERVTLSCRASQEISDYLYWYQQKSHESPRLLIKYASQSISGIPARFSGSGS

SEQ ID NO: 5521 - protein, 200 aa, Artificial Sequence
  source: /note="Description of Artificial Sequence: Synthetic single chain variable fragment"
QVQLVQSGAEVVKPGASVKLSCKTSGYTFTNYDINWVRQRPGQGLEWVGWIFPGDGSTQYNEKFKGKATLTTDTSTSTAYMELSSLRSEDTAVYFCARQTTSTWFAYWGQGTLVTVSSGGGGSGGGGSGGGGSEIVMTQSPATLSVSPGERVTLSCRASQEISDYLYWYQQKSHESPRLLIKYASQSISGIPARFSGSGS

SEQ ID NO: 5522 - protein, 200 aa, Artificial Sequence
  source: /note="Description of Artificial Sequence: Synthetic single chain variable fragment"
QVQLVQSGAEVVKPGASVKLSCKTSGYTFTNYDINWVRQRPGQGLEWIGWIFPGDGSTQYNEKFKGKATLTTDTSTSTAYLELSSLGSEDTAVYFCARQTTGTWFAYWGQGTLVTVSSGGGGSGGGGSGGGGSEIVMTQSPATLSVSPGERVTLSCRASQSISDYLYWYQQKSHESPRLLIKYASQSISGIPARFSGSGS

SEQ ID NO: 5523 - protein, 200 aa, Artificial Sequence
  source: /note="Description of Artificial Sequence: Synthetic single chain variable fragment"
  MOD_RES (2)..(6): Any amino acid
  MOD_RES (17)..(19): Any amino acid
QXXXXXSGAEVVKPGAXXXLSCKTSGYTFTNYDINWVRQRPGQGLEWIGWIFPGDGSTQYNEKFKGKATLTTDTSTSTAYLELSSLGSEDTAVYFCARQTTGTWFAYWGQGTLVTVSSGGGGSGGGGSGGGGSEIVMTQSPATLSVSPGERVTLSCRASQSISDYLYWYQQKSHESPRLLIKYASQSISGIPARFSGSGS

SEQ ID NO: 5524 - protein, 263 aa, Artificial Sequence
  source: /note="Description of Artificial Sequence: Synthetic single chain variable fragment"
QPVLTQSHTVTITCTGYVQWYQQRSVSESPGKSGGNIATQPGSGPTTVIYDDDQRPSGVPDRFTGSIDSSSNSASLTISGLKTEDEADYYCQSYDSTNHGVFGGGAKVTVLGGSSRSSSSGGGGSGGGGQVQLQQWGPGLVKPSETLSLTCTVSGGSISSSSYYWGWIRQPPGKGLEWIGSIYYSGSTYYNPSLKSRVTISVDTSKNQFSLKLSSVTAADTAVYYCARLSKGYSSSWAYSYYGPDAWGQGTMVTVSSFEGSEQ

SEQ ID NO: 5525 - protein, 253 aa, Artificial Sequence
  source: /note="Description of Artificial Sequence: Synthetic single chain variable fragment"
DIVMTQTPATLSVSPGKRATLSCRASQSVSSNYLAWYQQKPGQAPRLLIYGASRRATGIPDRFSGSGSGTDFTLTISSLQAEDVAVYYCQQYGSSPRTFGQGTKLEIKGGSSRSSSSGGGGSGGGGQVTLKESGAEVKNPGSSVKVSCKASGGTFSSYAISWLRQAPGQGLEWMGWINPNSGGSDYAQRFQGRVTMTRDTSINTVYMELSRLRSDDTAVYYCARVEKRGYYYGMDVWGQGTMVTVSSFEGSEQ

SEQ ID NO: 5526 - protein, 254 aa, Artificial Sequence
  source: /note="Description of Artificial Sequence: Synthetic single chain variable fragment"
RPVLTQPPSAAGTPGQRVTISCSGSSSNIGSNYVYWYQQLPGMAPKLLIYTNNQRPSGVPGRFSGSKSGTSASLAISGLRSEDEADYYCAAWDDSLNGWVFGGGTELTVLGGSSRSSSSGGGGSGGGGQVQLQESGPGLVKPSETLSLTCNVSGRSVSSGFYWSWIRQRPGKGLEWVGSIYRSGLTYYNPSLKSRVTISVDTSKNQFSLKLSSVTAADTAVYYCARATPWYYYGMDVWGQGTTVTVSSFEGSEQ

SEQ ID NO: 5527 - protein, 255 aa, Artificial Sequence
  source: /note="Description of Artificial Sequence: Synthetic single chain variable fragment"
QPGLTQPPSASGTPGQRVTISCSGSSSNIGSNYVYWYQQFPGTAPKLLIYRNNQRPSGVPDRFSGSKSGTSASLAISGLRSEDEADYYCAAWDDSLSVWVFGGGTKVTVLGGSSRSSSSGGSGSGGGGQVTLKESGAEVKNPGSSVKVSCKASGGTFSSYAISWLRQAPGQGLEWMGWINPNSGGSDYAQRFQGRVTMTRDTSINTVYMELSRLRSDDTAVYYCARVEKRGYYYGMDVWGQGTMVTVSSFEGSEQ

SEQ ID NO: 5528 - protein, 263 aa, Artificial Sequence
  source: /note="Description of Artificial Sequence: Synthetic single chain variable fragment"
QPVLTQSHSVSESPGKTVTITCTGSGGNIATQYVQWYQQRPGSGPTTVIYDDDQRPSGVPDRFTGSIDSSSNSASLTISGLKTEDEADYYCQSYDSTNHGVFGGGAKVTVLGGSSRSSSSGGGGSGGGGQVQLQQWGPGLVKPSETLSLTCTVSGGSISSSSYYWGWIRQPPGKGLEWIGSIYYSGSTYYNPSLKSRVTISVDTSKNQFSLKLSSVTAADTAVYYCARLSKGYSSSWAYSYYGPDAWGQGTMVTVSSFEGSEQ

SEQ ID NO: 5529 - protein, 243 aa, Artificial Sequence
  source: /note="Description of Artificial Sequence: Synthetic single chain variable fragment"
EVQLLESGGGLVQPGGSLRLSCAVSGFALSNHGMSWVRRAPGKGLEWVSGIVYSGSTYYAASVKGRFTISRDNSRNTLYLQMNSLRPEDTAIYYCSAHGGESDVWGQGTTVTVSSASGGGGSGGRASGGGGSDIVMTQTPLSLSVTPGQPASISCKSSQSLLRNDGKTPLYWYLQKAGQPPQLLIYEVSNRFSGVPDRFSGSGSGTDFTLKISRVEAEDVGAYYCMQNIQFPSFGGGTKLEIK

SEQ ID NO: 5530 - protein, 248 aa, Artificial Sequence
  source: /note="Description of Artificial Sequence: Synthetic single chain variable fragment"
QVQLVQSGAEVRKTGASVKVSCKASGYIFDNFGINWVRQAPGQGLEWMGWINPKNNNTNYAQKFQGRVTITADESTNTAYMEVSSLRSEDTAVYYCARGPYYYQSYMDVWGQGTMVTVSSASGGGGSGGRASGGGGSDIVMTQTPLSLPVTPGEPASISCRSSQSLLHSNGYNYLNWYLQKPGQSPQLLIYGSKRASGVPDRFSGSGSGTDFTLHITRVGAEDVGVYYCMQALQTPYTFGQGTKLEIK

SEQ ID NO: 5531 - protein, 238 aa, Artificial Sequence
  source: /note="Description of Artificial Sequence: Synthetic single chain variable fragment"
EVQLLETGGGLVQPGGSLRLSCAVSGFALSNHGMSWVRRAPGKGLEWVSGIVYSGSTYYAASVKGRFTISRDNSRNTLYLQMNSLRPEDTAIYYCSAHGGESDVWGQGTTVTVSSASGGGGSGGRASGGGGSEIVLTQSPATLSVSPGESATLSCRASQSVSSNLAWYQQKPGQAPRLLIYGASTRASGIPDRFSGSGSGTDFTLTISSLQAEDVAVYYCQQYGSSLTFGGGTKVEIK

SEQ ID NO: 5532 - protein, 239 aa, Artificial Sequence
  source: /note="Description of Artificial Sequence: Synthetic single chain variable fragment"
EVQLVETGGGLVQPGGSLRLSCAVSGFALSNHGMSWVRRAPGKGLEWVSGIVYSGSTYYAASVKGRFTISRDNSRNTLYLQMNSLRPEDTAIYYCSAHGGESDVWGQGTTVTVSSASGGGGSGGRASGGGGSEIVMTQSPATLSVSPGERATLSCRASQSVSSKLAWYQQKPGQAPRLLMYGASIRATGIPDRFSGSGSGTEFTLTISSLEPEDFAVYYCQQYGSSSWTFGQGTKVEIK

SEQ ID NO: 5533 - protein, 241 aa, Artificial Sequence
  source: /note="Description of Artificial Sequence: Synthetic single chain variable fragment"
EVQLVETGGGVVQPGGSLRLSCAVSGFALSNHGMSWVRRAPGKGLEWVSGIVYSGSTYYAASVKGRFTISRDNSRNTLYLQMNSLRPEDTAIYYCSAHGGESDVWGQGTTVTVSSASGGGGSGGRASGGGGSEIVLTQSPGTLSLSPGERATLSCRASQSVGSTNLAWYQQKPGQAPRLLIYDASNRATGIPDRFSGGGSGTDFTLTISRLEPEDFAVYYCQQYGSSPPWTFGQGTKVEIK

SEQ ID NO: 5534 - protein, 238 aa, Artificial Sequence
  source: /note="Description of Artificial Sequence: Synthetic single chain variable fragment"
EVQLVESGGGLVQPGGSLRLSCAVSGFALSNHGMSWVRRAPGKGLEWVSGIVYSGSTYYAASVKRFTISRDNSRNTLYLQMNSLRPEDTAIYYCSAHGGESDVWGQGTTVTVSSASGGGGSGGRASGGGGSDIQLTQSPSSLSASVGDRVTITCRASQSISSYLNWYQQKPGKAPKLLIYAASSLQSGVPSRFSGSGSGTDFTLTISSLQPEDFATYYCQQSYSTPYTFGQGTKVEIK

SEQ ID NO: 5535 - protein, 239 aa, Artificial Sequence
  source: /note="Description of Artificial Sequence: Synthetic single chain variable fragment"
QVQLVESGGGLVQPGGSLRLSCAVSGFALSNHGMSWVRRAPGKGLEWVSGIVYSGSTYYAASVKGRFTISRDNSRNTLYLQMNSLRPEDTAIYYCSAHGGESDVWGQGTTVTVSSASGGGGSGGRASGGGGSDIRLTQSPSPLSASVGDRVTITCQASEDINKFLNWYHQTPGKAPKLLIYDASTLQTGVPSRFSGSGSGTDFTLTINSLQPEDIGTYYCQQYESLPLTFGGGTKVEIK

SEQ ID NO: 5536 - protein, 240 aa, Artificial Sequence
  source: /note="Description of Artificial Sequence: Synthetic single chain variable fragment"
EVQLVETGGGLVQPGGSLRLSCAVSGFALSNHGMSWVRRAPGKGLEWVSGIVYSGSTYYAASVKGRFTISRDNSRNTLYLQMNSLRPEDTAIYYCSAHGGESDVWGQGTTVTVSSASGGGGSGGRASGGGGSETTLTQSPATLSVSPGERATLSCRASQSVGSNLAWYQQKPGQGPRLLIYGASTRATGIPARFSGSGSGTEFTLTISSLQPEDFAVYYCQQYNDWLPVTFGQGTKVEIK

SEQ ID NO: 5537 - protein, 241 aa, Artificial Sequence
  source: /note="Description of Artificial Sequence: Synthetic single chain variable fragment"
EVQLVESGGGLVQPGGSLRLSCAVSGFALSNHGMSWVRRAPGKGLEWVSGIVYSGSTYYAASVKGRFTISRDNSRNTLYLQMNSLRPEDTAIYYCSAHGGESDVWGQGTTVTVSSASGGGGSGGRASGGGGSEIVLTQSPGTLSLSPGERATLSCRASQSIGSSSLAWYQQKPGQAPRLLMYGASSRASGIPDRFSGSGSGTDFTLTISRLEPEDFAVYYCQQYAGSPPFTFGQGTKVEIK

SEQ ID NO: 5538 - protein, 241 aa, Artificial Sequence
  source: /note="Description of Artificial Sequence: Synthetic single chain variable fragment"
EVQLVETGGGLVQPGGSLRLSCAASGITFSRYPMSWVRQAPGKGLEWVSGISDSGVSTYYADSAKGRFTISRDNSKNTLFLQMSSLRDEDTAVYYCVTRAGSEASDIWGQGTMVTVSSGGGGSGGGGSGGGGSEIVLTQSPATLSLSPGERATLSCRASQSVSNSLAWYQQKPGQAPRLLIYDASSRATGIPDRFSGSGSGTDFTLTISRLEPEDFAIYYCQQFGTSSGLTFGGGTKLEIK

SEQ ID NO: 5539 - protein, 248 aa, Artificial Sequence
  source: /note="Description of Artificial Sequence: Synthetic single chain variable fragment"
QVQLVESGGGLVQPGGSLRLSCAASGFTFSSYAMSWVRQAPGKGLEWVSAISGSGGSTYYADSVKGRFTISRDNAKNSLYLQMNSLRAEDTAIYYCARATYKRELRYYYGMDVWGQGTMVTVSSGGGGSGGGGSGGGGSEIVMTQSPGTVSLSPGERATLSCRASQSVSSSFLAWYQQKPGQAPRLLIYGASSRATGIPDRFSGSGSGTDFTLTISRLEPEDSAVYYCQQYHSSPSWTFGQGTRLEIK

SEQ ID NO: 5540 - protein, 248 aa, Artificial Sequence
  source: /note="Description of Artificial Sequence: Synthetic single chain variable fragment"
EVQLVETGGGLVQPGGSLRLSCAASGFTFSSYAMSWVRQAPGKGLEWVSAISGSGGSTYYADSVKGRFTISRDNSKNTLYLQMNTLKAEDTAVYYCARATYKRELRYYYGMDVWGQGTTVTVSSGGGGSGGGGSGGGGSEIVLTQSPSTLSLSPGESATLSCRASQSVSTTFLAWYQQKPGQAPRLLIYGSSNRATGIPDRFSGSGSGTDFTLTIRRLEPEDFAVYYCQQYHSSPSWTFGQGTKVEIK

SEQ ID NO: 5541 - protein, 238 aa, Artificial Sequence
  source: /note="Description of Artificial Sequence: Synthetic single chain variable fragment"
EVQLVETGGGLVQPGRSLRLSCAASGFTFDDYAMHWVRQAPGKGLEWVSGISWNSGSIGYADSVGRFTISRDNAKNSLYLQMNSLRDEDTAVYYCARVGKAVPDVWGQGTTVTVSSGGGGSGGGGSGGGGSDIVMTQTPSSLSASVGDRVTITCRASQSISSYLNWYQQKPGKAPKLLIYAASSLQSGVPSRFSGSGSGTDFTLTISSLQPEDFATYYCQQSYSTPYSFGQGTRLEIK

SEQ ID NO: 5542 - protein, 241 aa, Artificial Sequence
  source: /note="Description of Artificial Sequence: Synthetic single chain variable fragment"
EVQLVESGGGLVQPGGSLRLSCAASGFTFSSYAMSWVRQAPGKGLEWVSAISGSGGSTYYADSVKGRFTISRDNSKNTLYLQMNSLRAEDTAVYYCAKVVRDGMDVWGQGTTVTVSSGGGGSGGGGSGGGGSEIVLTQSPATLSLSPGERATLSCRASQSVSSSYLAWYQQKPGQAPRLLIYGASSRATGIPDRFSGNGSGTDFTLTISRLEPEDFAVYYCQQYGSPPRFTFGPGTKVDIK

SEQ ID NO: 5543 - protein, 248 aa, Artificial Sequence
  source: /note="Description of Artificial Sequence: Synthetic single chain variable fragment"
EVQLVETGGGLVQPGGSLRLSCAASGFTFSSYAMSWVRQAPGKGLEWVSAISGSGGSTYYADSVKGRFTMSRENDKNSVFLQMNSLRVEDTGVYYCARANYKRELRYYYGMDVWGQGTMVTVSSGGGGSGGGGSGGGGSEIVMTQSPGTLSLSPGESATLSCRASQRVASNYLAWYQHKPGQAPSLLISGASSRATGVPDRFSGSGSGTDFTLAISRLEPEDSAVYYCQHYDSSPSWTFGQGTKVEIK

SEQ ID NO: 5544 - protein, 250 aa, Artificial Sequence
  source: /note="Description of Artificial Sequence: Synthetic single chain variable fragment"
QVQLVESGGGLVQPGGSLRLSCAASGFTFSSYAMSWVRQAPGKGLEWVSAISGSGGSTYYADSVKGRFTISRDNSKNTLYLQMNSLRAEDTAVYYCAKVGYDSSGYYRDYYGMDVWGQGTTVTVSSGGGGSGGGGSGGGGSEIVLTQSPGTLSLSPGERATLSCRASQSVSSSYLAWYQQKPGQAPRLLIYTSSRATGISDRFSGSGSGTDFTLTISRLEPEDFAVYYCQHYGNSPPKFTFGPGTKLEIK

SEQ ID NO: 5545 - protein, 243 aa, Artificial Sequence
  source: /note="Description of Artificial Sequence: Synthetic single chain variable fragment"
QVQLQESGPGLVKPSETLSLTCTVSGGSISSSYYYWGWIRQPPGKGLEWIGSIYYSGSAYYNPSLKSRVTISVDTSKNQFSLRLSSVTAADTAVYYCARHWQEWPDAFDIWGQGTMVTVSSGGGGSGGGGSGGGGSETTLTQSPAFMSATPGDKVIISCKASQDIDDAMNWYQQKPGEAPLFIIQSATSPVPGIPPRFSGSGFGTDFSLTINNIESEDAAYYFCLQHDNFPLTFGQGTKLEIK

SEQ ID NO: 5546 - protein, 244 aa, Artificial Sequence
  source: /note="Description of Artificial Sequence: Synthetic single chain variable fragment"
VNLRESGPALVKPTQTLTLTCTFSGFSLRTSGMCVSWIRQPPGKALEWLARIDWDEDKFYSTSLKTRLTISKDTSDNQVVLRMTNMDPADTATYYCARSGAGGTSATAFDIWGPGTMVTVSSGGGGSGGGGSGGGGSDIQMTQSPSSLSASVGDRVTITCRASQDIYNNLAWFQLKPGSAPRSLMYAANKSQSGVPSRFSGSASGTDFTLTISSLQPEDFATYYCQHYYRFPYSFGQGTKLEIK

SEQ ID NO: 5547 - protein, 246 aa, Artificial Sequence
  source: /note="Description of Artificial Sequence: Synthetic single chain variable fragment"
EVQLVESGGGLVKPGGSLRLSCAASGFTFSSYSMNWVRQAPGKGLEWVSSISSSSSYIYYADSVKGRFTISRDNAKNSLYLQMNSLRAEDTAVYYCAKTIAAVYAFDIWGQGTTVTVSSGGGGSGGGGSGGGGSEIVLTQSPLSLPVTPEEPASISCRSSQSLLHSNGYNYLDWYLQKPGQSPQLLIYLGSNRASGVPDRFSGSGSGTDFTLKISRVEAEDVGVYYCMQALQTPYTFGQGTKLEIK

SEQ ID NO: 5548 - protein, 240 aa, Artificial Sequence
  source: /note="Description of Artificial Sequence: Synthetic single chain variable fragment"
EVQLVESGGGLVKPGGSLRLSCAASGFTFSDYYMSWIRQAPGKGLEWVSYISSSGSTIYYADSVKGRFTISRDNAKNSLYLQMNSLRAEDTAVYYCARDLRGAFDIWGQGTMVTVSSGGGGSGGGGSGGGGSSYVLTQSPSVSAAPGYTATISCGGNNIGTKSVHWYQQKPGQAPLLVIRDDSVRPSKIPGRFSGSNSGNMATLTISGVQAGDEADFYCQVWDSDSEHVVFGGGTKLTVL

SEQ ID NO: 5549 - protein, 241 aa, Artificial Sequence
  source: /note="Description of Artificial Sequence: Synthetic single chain variable fragment"
QVQLVQSGAEVKKPGASVKVSCKPSGYTVTSHYIHWVRRAPGQGLEWMGMINPSGGVTAYSQTLQGRVTMTSDTSSSTVYMELSSLRSEDTAMYYCAREGSGSGWYFDFWGRGTLVTVSSGGGGSGGGGSGGGGSSYVLTQPPSVSVSPGQTASITCSGDGLSKKYVSWYQQKAGQSPVVLISRDKERPSGIPDRFSGSNSADTATLTISGTQAMDEADYYCQAWDDTTVVFGGGTKLTVL

SEQ ID NO: 5550 - protein, 245 aa, Artificial Sequence
  source: /note="Description of Artificial Sequence: Synthetic single chain variable fragment"
QVQLQESGPGLVKPSQTLSLTCTVSGGSISSGGYYWSWIRQHPGKGLEWIGYIYYSGSTYYNPSLKSRVTISVDTSKNQFSLKLSSVTAADTAVYYCARAGIAARLRGAFDIWGQGTMVTVSSGGGGSGGGGSGGGGSDIVMTQSPSSVSASVGDRVIITCRASQGIRNWLAWYQQKPGKAPNLLIYAASNLQSGVPSRFSGSGSGADFTLTISSLQPEDVATYYCQKYNSAPFTFGPGTKVDIK

SEQ ID NO: 5551 - protein, 253 aa, Artificial Sequence
  source: /note="Description of Artificial Sequence: Synthetic single chain variable fragment"
QVQLVQSGAEVKKPGSSVKVSCKASGGTFSSYAISWVRQAPGQGLEWMGGIIPIFGTANYAQKFQGRVTITADESTSTAYMELSSLRSEDTAVYYCARRGGYQLLRWDVGLLRSAFDIWGQGTMVTVSSGGGGSGGGGSGGGGSSYVLTQPPSVSVAPGQTARITCGGNNIGSKSVHWYQQKPGQAPVLVLYGKNNRPSGVPDRFSGSRSGTTASLTITGAQAEDEADYYCSSRDSSGDHLRVFGTGTKVTVL

SEQ ID NO: 5552 - protein, 248 aa, Artificial Sequence
  source: /note="Description of Artificial Sequence: Synthetic single chain variable fragment"
EVQLQQSGPGLVKPSQTLSLTCAISGDSVSSNSAAWNWIRQSPSRGLEWLGRTYYRSKWYSFYAISLKSRIIINPDTSKNQFSLQLKSVTPEDTAVYYCARSSPEGLFLYWFDPWGQGTLVTVSSGGDGSGGGGSGGGGSSSELTQDPAVSVALGQTIRITCQGDSLGNYYATWYQQKPGQAPVLVIYGTNNRPSGIPDRFSASSSGNTASLTITGAQAEDEADYYCNSRDSSGHHLLFGTGTKVTVL

SEQ ID NO: 5553 - protein, 241 aa, Artificial Sequence; identical to SEQ ID NO: 5538
  source: /note="Description of Artificial Sequence: Synthetic single chain variable fragment"

SEQ ID NO: 5554 - protein, 248 aa, Artificial Sequence; identical to SEQ ID NO: 5539
  source: /note="Description of Artificial Sequence: Synthetic single chain variable fragment"

SEQ ID NO: 5555 - protein, 248 aa, Artificial Sequence; identical to SEQ ID NO: 5540
  source: /note="Description of Artificial Sequence: Synthetic single chain variable fragment"

SEQ ID NO: 5556 - protein, 239 aa, Artificial Sequence
  source: /note="Description of Artificial Sequence: Synthetic single chain variable fragment"
EVQLVETGGGLVQPGRSLRLSCAASGFTFDDYAMHWVRQAPGKGLEWVSGISWNSGSIGYADSVKGRFTISRDNAKNSLYLQMNSLRDEDTAVYYCARVGKAVPDVWGQGTTVTVSSGGGGSGGGGSGGGGSDIVMTQTPSSLSASVGDRVTITCRASQSISSYLNWYQQKPGKAPKLLIYAASSLQSGVPSRFSGSGSGTDFTLTISSLQPEDFATYYCQQSYSTPYSFGQGTRLEIK

SEQ ID NO: 5557 - protein, 246 aa, Artificial Sequence
  source: /note="Description of Artificial Sequence: Synthetic single chain variable fragment"
EVQLVESGGGLVQPGRSLRLSCTASGFTFDDYAMHWVRQRPGKGLEWVASINWKGNSLAYGDSVKGRFAISRDNAKNTVFLQMNSLRTEDTAVYYCASHQGVAYYNYAMDVWGRGTLVTVSSGGGGSGGGGSGGGGSEIVLTQSPGTLSLSPGERATLSCRATQSIGSSFLAWYQQRPGQAPRLLIYGASQRATGIPDRFSGRGSGTDFTLTISRVEPEDSAVYYCQHYESSPSWTFGQGTKVEIK

SEQ ID NO: 5558 - protein, 241 aa, Artificial Sequence; identical to SEQ ID NO: 5542
  source: /note="Description of Artificial Sequence: Synthetic single chain variable fragment"

SEQ ID NO: 5559 - protein, 242 aa, Artificial Sequence
  source: /note="Description of Artificial Sequence: Synthetic single chain variable fragment"
EVQLLESGGGLVQPGGSLRLSCAASGFTFSSYAMSWVRQAPGKGLEWVSAISGSGGSTYYADSVKGRFTISRDNSKNTLYLQMNSLRAEDTAVYYCAKIPQTGTFDYWGQGTLVTVSSGGGGSGGGGSGGGGSEIVLTQSPGTLSLSPGERATLSCRASQSVSSSYLAWYQQRPGQAPRLLIYGASSRATGIPDRFSGSGSGTDFTLTISRLEPEDFAVYYCQHYGSSPSWTFGQGTRLEIK

SEQ ID NO: 5560 - protein, 248 aa, Artificial Sequence; identical to SEQ ID NO: 5543
  source: /note="Description of Artificial Sequence: Synthetic single chain variable fragment"

SEQ ID NO: 5561 - protein, 244 aa, Artificial Sequence
  source: /note="Description of Artificial Sequence: Synthetic single chain variable fragment"
EVQLLETGGGLVQPGGSLRLSCAASGFSFSSYAMSWVRQAPGKGLEWVSAISGSGGSTYYADSVKGRFTISRDNSKNTLYLQMNSLRAEDTAVYYCAKALVGATGAFDIWGQGTLVTVSSGGGGSGGGGSGGGGSEIVLTQSPGTLSLSPGERATLSCRASQSLSSNFLAWYQQKPGQAPGLLIYGASNWATGTPDRFSGSGSGTDFTLTITRLEPEDFAVYYCQYYGTSPMYTFGQGTKVEIK

SEQ ID NO: 5562 - protein, 244 aa, Artificial Sequence
  source: /note="Description of Artificial Sequence: Synthetic single chain variable fragment"
EVQLLESGGGLVQPGGSLRLSCAASGFTFSSYAMSWVRQAPGKGLEWVSAISGSGGSTYYADSVKGRFTISRDNSKNTLYLQMNSLRAEDTAVYYCVLWFGEGFDPWGQGTLVTVSSGGGGSGGGGSGGGGSDIVLTQSPLSLPVTPGEPASISCRSSQSLLHSNGYNYLDWYLQKPGQSPQLLIYLGSNRASGVPDRFSGSGSGTDFTLKISRVEAEDVGVYYCMQALQTPLTFGGGTKVDIK

SEQ ID NO: 5563 - protein, 251 aa, Artificial Sequence
  source: /note="Description of Artificial Sequence: Synthetic single chain variable fragment"
QVQLVESGGGLVQPGGSLRLSCAASGFTFSSYAMSWVRQAPGKGLEWVSAISGSGGSTYYADSVKGRFTISRDNSKNTLYLQMNSLRAEDTAVYYCAKVGYDSSGYYRDYYGMDVWGQGTTVTVSSGGGGSGGGGSGGGGSEIVLTQSPGTLSLSPGERATLSCRASQSVSSSYLAWYQQKPGQAPRLLIYGTSSRATGISDRFSGSGSGTDFTLTISRLEPEDFAVYYCQHYGNSPPKFTFGPGTKLEIK

SEQ ID NO: 5564 - protein, 246 aa, Artificial Sequence
  source: /note="Description of Artificial Sequence: Synthetic single chain variable fragment"
EVQLVESGGGLVQPGGSLRLSCAASGFTFSSYAMSWVRQAPGKGLEWVSAISGSGGSTYYADSVKGRFTISRDNSKNTLYLQMNSLRAEDTAVYYCAKMGWSSGYLGAFDIWGQGTTVTVSSGGGGSGGGGSGGGGSEIVLTQSPGTLSLSPGERATLSCRASQSVASSFLAWYQQKPGQAPRLLIYGASGRATGIPDRFSGSGSGTDFTLTISRLEPEDFAVYYCQHYGGSPRLTFGGGTKVDIK

SEQ ID NO: 5565 - protein, 244 aa, Artificial Sequence
  source: /note="Description of Artificial Sequence: Synthetic single chain variable fragment"
QIQLVQSGPDLKKPGETVKLSCKASGYTFTNFGMNWVKQAPGKGFKWMAWINTYTGESYFADDFKGRFAFSVETSATTAYLQINNLKTEDTATYFCARGEIYYGYDGGFAYWGQGTLVTVSAGGGGSGGGGSGGGGSDVVMTQSHRFMSTSVGDRVSITCRASQDVNTAVSWYQQKPGQSPKLLIFSASYRYTGVPDRFTGSGSGADFTLTISSVQAEDLAVYYCQQHYSTPWTFGGGTKLDIK

SEQ ID NO: 5566 - protein, 249 aa, Artificial Sequence
  source: /note="Description of Artificial Sequence: Synthetic single chain variable fragment"
QIQLVQSGPELKKPGETVKISCKASGYTFTDYSINWVKRAPGKGLKWMGWINTETREPAYAYDFRGRFAFSLETSASTAYLQINNLKYEDTATYFCALDYSYAMDYWGQGTSVTVSSGGGGSGGGGSGGGGSQIQLVQSGPELKKPGETVKISCKASGYTFTDYSINWVKRAPGKGLKWMGWINTETREPAYAYDFRGRFAFSLETSASTAYLQINNLKYEDTATYFCALDYSYAMDYWGQGTSVTVSS

SEQ ID NO: 5567 - protein, 243 aa, Artificial Sequence
  source: /note="Description of Artificial Sequence: Synthetic single chain variable fragment"
QIQLVQSGPELKKPGETVKISCKASGYTFRHYSMNWVKQAPGKGLKWMGRINTESGVPIYADDFKGRFAFSVETSASTAYLVINNLKDEDTASYFCSNDYLYSLDFWGQGTALTVSSGGGGSGGGGSGGGGSDIVLTQSPPSLAMSLGKRATISCRASESVTILGSHLIYWYQQKPGQPPTLLIQLASNVQTGVPARFSGSGSRTDFTLTIDPVEEDDVAVYYCLQSRTIPRTFGGGTKLEIK

SEQ ID NO: 5568 - protein, 243 aa, Artificial Sequence
  source: /note="Description of Artificial Sequence: Synthetic single chain variable fragment"
QIQLVQSGPELKKPGETVKISCKASGYTFTHYSMNWVKQAPGKGLKWMGRINTETGEPLYADDFKGRFAFSLETSASTAYLVINNLKNEDTATFFCSNDYLYSCDYWGQGTTLTVSSGGGGSGGGGSGGGGSDIVLTQSPPSLAMSLGKRATISCRASESVTILGSHLIYWYQQKPGQPPTLLIQLASNVQTGVPARFSGSGSRTDFTLTIDPVEEDDVAVYYCLQSRTIPRTFGGGTKLEIK

SEQ ID NO: 5569 - protein, 249 aa, Artificial Sequence
  source: /note="Description of Artificial Sequence: Synthetic single chain variable fragment"
QVQLVQSGAEVKKPGSSVKVSCKASGGTFSNYWMHWVRQAPGQGLEWMGATYRGHSDTYYNQKFKGRVTITADKSTSTAYMELSSLRSEDTAVYYCARGAIYNGYDVLDNWGQGTLVTVSSGGGGSGGGGSGGGGSGGGGSDIQMTQSPSSLSASVGDRVTITCSASQDISNYLNWYQQKPGKAPKLLIYYTSNLHSGVPSRFSGSGSGTDFTLTISSLQPEDFATYYCQQYRKLPWTFGQGTKLEIKR

SEQ ID NO: 5570 - protein, 249 aa, Artificial Sequence
  source: /note="Description of Artificial Sequence: Synthetic single chain variable fragment"
DIQMTQSPSSLSASVGDRVTITCSASQDISNYLNWYQQKPGKAPKLLIYYTSNLHSGVPSRFSGSGSGTDFTLTISSLQPEDFATYYCQQYRKLPWTFGQGTKLEIKRGGGGSGGGGSGGGGSGGGGSQVQLVQSGAEVKKPGSSVKVSCKASGGTFSNYWMHWVRQAPGQGLEWMGATYRGHSDTYYNQKFKGRVTITADKSTSTAYMELSSLRSEDTAVYYCARGAIYNGYDVLDNWGQGTLVTVSS

SEQ ID NO: 5571 - protein, 249 aa, Artificial Sequence; identical to SEQ ID NO: 5570
  source: /note="Description of Artificial Sequence: Synthetic single chain variable fragment"

SEQ ID NO: 5572 - protein, 246 aa, Artificial Sequence
  source: /note="Description of Artificial Sequence: Synthetic single chain variable fragment"
QVQLVESGGGLVQPGRSLRLSCAASGFTFSNYAMSWVRQAPGKGLGWVSGISRSGENTYYADSVKGRFTISRDNSKNTLYLQMNSLRDEDTAVYYCARSPAHYYGGMDVWGQGTTVTVSSASGGGGSGGRASGGGGSDIVLTQSPGTLSLSPGERATLSCRASQSISSSFLAWYQQKPGQAPRLLIYGASRRATGIPDRFSGSGSGTDFTLTISRLEPEDSAVYYCQQYHSSPSWTFGQGTKLEIK

SEQ ID NO: 5573 - protein, 244 aa, Artificial Sequence
  source: /note="Description of Artificial Sequence: Synthetic single chain variable fragment"
QVQLVESGGGLVQPGRSLRLSCAASGFTFDDYAMHWVRQAPGKGLEWVSGISWNSGSIGYADSVKGRFTISRDNAKNSLYLQMNSLRAEDTALYYCSVHSFLAYWGQGTLVTVSSASGGGGSGGRASGGGGSDIVMTQTPLSLPVTPGEPASISCRSSQSLLHSNGYNYLDWYLQKPGQSPQLLIYLGSNRASGVPDRFSGSGSGTDFTLKISRVEAEDVGVYYCMQALQTPYTFGQGTKVEIK

SEQ ID NO: 5574 - protein, 243 aa, Artificial Sequence; identical to SEQ ID NO: 5529
  source: /note="Description of Artificial Sequence: Synthetic single chain variable fragment"

SEQ ID NO: 5575 - protein, 249 aa, Artificial Sequence
  source: /note="Description of Artificial Sequence: Synthetic single chain variable fragment"
QVQLVQSGAEVRKTGASVKVSCKASGYIFDNFGINWVRQAPGQGLEWMGWINPKNNNTNYAQKFQGRVTITADESTNTAYMEVSSLRSEDTAVYYCARGPYYYQSYMDVWGQGTMVTVSSASGGGGSGGRASGGGGSDIVMTQTPLSLPVTPGEPASISCRSSQSLLHSNGYNYLNWYLQKPGQSPQLLIYLGSKRASGVPDRFSGSGSGTDFTLHITRVGAEDVGVYYCMQALQTPYTFGQGTKLEIK

SEQ ID NO: 5576 - protein, 246 aa, Artificial Sequence
  source: /note="Description of Artificial Sequence: Synthetic single chain variable fragment"
QVQLQESGGGLVQPGGSLRLSCAASGFTFSSDAMTWVRQAPGKGLEWVSVISGSGGTTYYADSVKGRFTISRDNSKNTLYLQMNSLRAEDTAVYYCAKLDSSGYYYARGPRYWGQGTLVTVSSASGGGGSGGRASGGGGSDIQLTQSPSSLSASVGDRVTITCRASQSISSYLNWYQQKPGKAPKLLIYGASTLASGVPARFSGSGSGTHFTLTINSLQSEDSATYYCQQSYKRASFGQGTKVEIK

SEQ ID NO: 5577 - protein, 247 aa, Artificial Sequence
  source: /note="Description of Artificial Sequence: Synthetic single chain variable fragment"
QVQLVQSGAEVKKPGASVKVSCKASGYTFSNYGITWVRQAPGQGLEWMGWISAYNGNTNYAQKFQGRVTMTRNTSISTAYMELSSLRSEDTAVYYCARGPYYYYMDVWGKGTMVTVSSASGGGGSGGRASGGGGSEIVMTQSPLSLPVTPGEPASISCRSSQSLLYSNGYNYVDWYLQKPGQSPQLLIYLGSNRASGVPDRFSGSGSGTDFKLQISRVEAEDVGIYYCMQGRQFPYSFGQGTKVEIK

SEQ ID NO: 5578 - protein, 238 aa, Artificial Sequence; identical to SEQ ID NO: 5531
  source: /note="Description of Artificial Sequence: Synthetic single chain variable fragment"

SEQ ID NO: 5579 - protein, 239 aa, Artificial Sequence; identical to SEQ ID NO: 5532
  source: /note="Description of Artificial Sequence: Synthetic single chain variable fragment"

SEQ ID NO: 5580 - protein, 241 aa, Artificial Sequence; identical to SEQ ID NO: 5533
  source: /note="Description of Artificial Sequence: Synthetic single chain variable fragment"

SEQ ID NO: 5581 - protein, 239 aa, Artificial Sequence
  source: /note="Description of Artificial Sequence: Synthetic single chain variable fragment"
QVQLVESGGGLVKPGGSLRLSCAASGFTFSDYYMSWIRQAPGKGLEWVSYISSSGSTIYYADSVKGRFTISRDNAKNSLYLQMNSLRAEDTAVYYCARESGDGMDVWGQGTTVTVSSASGGGGSGGRASGGGGSDIQMTQSPSSLSASVGDRVTITCRASQSISSYLNWYQQKPGKAPKLLIYAASSLQSGVPSRFSGSGSGTDFTLTISSLQPEDFATYYCQQSYTLAFGQGTKVDIK

SEQ ID NO: 5582 - protein, 239 aa, Artificial Sequence
  source: /note="Description of Artificial Sequence: Synthetic single chain variable fragment"
EVQLVESGGGLVQPGGSLRLSCAVSGFALSNHGMSWVRRAPGKGLEWVSGIVYSGSTYYAASVKGRFTISRDNSRNTLYLQMNSLRPEDTAIYYCSAHGGESDVWGQGTTVTVSSASGGGGSGGRASGGGGSDIQLTQSPSSLSASVGDRVTITCRASQSISSYLNWYQQKPGKAPKLLIYAASSLQSGVPSRFSGSGSGTDFTLTISSLQPEDFATYYCQQSYSTPYTFGQGTKVEIK

SEQ ID NO: 5583 - protein, 246 aa, Artificial Sequence
  source: /note="Description of Artificial Sequence: Synthetic single chain variable fragment"
QVQLVQSGGGLVKPGGSLRLSCAASGFTFSDYYMSWIRQAPGKGLEWVSYISSSGNTIYYADSVKGRFTISRDNAKNSLYLQMNSLRAEDTAVYYCARSTMVREDYWGQGTLVTVSSASGGGGSGGRASGGGGSDIVLTQSPLSLPVTLGQPASISCKSSESLVHNSGKTYLNWFHQRPGQSPRRLIYEVSNRDSGVPDRFTGSGSGTDFTLKISRVEAEDVGVYYCMQGTHWPGTFGQGTKLEIK

SEQ ID NO: 5584 - protein, 239 aa, Artificial Sequence; identical to SEQ ID NO: 5535
  source: /note="Description of Artificial Sequence: Synthetic single chain variable fragment"

SEQ ID NO: 5585 - protein, 240 aa, Artificial Sequence; identical to SEQ ID NO: 5536
  source: /note="Description of Artificial Sequence: Synthetic single chain variable fragment"

SEQ ID NO: 5586 - protein, 106 aa, Artificial Sequence
  source: /note="Description of Artificial Sequence: Synthetic single chain variable fragment"
EVQLVESGGGLVQPGGSLRLSCAVSGFALSNHGMSWVRRAPGKGLEWVSGIVYSGSTYYAASVKGRFTISRDNSRNTLYLQMNSLRPEDTAIYYCSAHGGESDVWG

SEQ ID NO: 5587 - DNA, 717 bp, Artificial Sequence
  source: /note="Description of Artificial Sequence: Synthetic single chain variable fragment"
gaagtgcaattggtggaatcagggggaggacttgtgcagcctggaggatcgctgagactgtcatgtgccgtgtccggctttgccctgtccaaccacgggatgtcctgggtccgccgcgcgcctggaaagggcctcgaatgggtgtcgggtattgtgtacagcggtagcacctactatgccgcatccgtgaaggggagattcaccatcagccgggacaactccaggaacactctgtacctccaaatgaattcgctgaggccagaggacactgccatctactactgctccgcgcatggcggagagtccgacgtctggggacaggggaccaccgtgaccgtgtctagcgcgtccggcggaggcggcagcgggggtcgggcatcagggggcggcggatcggacatccagctcacccagtccccgagctcgctgtccgcctccgtgggagatcgggtcaccatcacgtgccgcgccagccagtcgatttcctcctacctgaactggtaccaacagaagcccggaaaagccccgaagcttctcatctacgccgcctcgagcctgcagtcaggagtgccctcacggttctccggctccggttccggtactgatttcaccctgaccatttcctccctgcaaccggaggacttcgctacttactactgccagcagtcgtactccaccccctacactttcggacaaggcaccaaggtcgaaatcaag

SEQ ID NO: 5588 - protein, 243 aa, Artificial Sequence; identical to SEQ ID NO: 5545
  source: /note="Description of Artificial Sequence: Synthetic single chain variable fragment"

SEQ ID NO: 5589 - protein, 244 aa, Artificial Sequence; identical to SEQ ID NO: 5546
  source: /note="Description of Artificial Sequence: Synthetic single chain variable fragment"

SEQ ID NO: 5590 - protein, 246 aa, Artificial Sequence; identical to SEQ ID NO: 5547
  source: /note="Description of Artificial Sequence: Synthetic single chain variable fragment"

SEQ ID NO: 5591 - protein, 240 aa, Artificial Sequence; identical to SEQ ID NO: 5548
  source: /note="Description of Artificial Sequence: Synthetic single chain variable fragment"

SEQ ID NO: 5592 - protein, 241 aa, Artificial Sequence; identical to SEQ ID NO: 5549
  source: /note="Description of Artificial Sequence: Synthetic single chain variable fragment"

SEQ ID NO: 5593 - protein, 245 aa, Artificial Sequence; identical to SEQ ID NO: 5550
  source: /note="Description of Artificial Sequence: Synthetic single chain variable fragment"

SEQ ID NO: 5594 - protein, 253 aa, Artificial Sequence; identical to SEQ ID NO: 5551
  source: /note="Description of Artificial Sequence: Synthetic single chain variable fragment"

SEQ ID NO: 5595 - protein, 248 aa, Artificial Sequence; identical to SEQ ID NO: 5552
  source: /note="Description of Artificial Sequence: Synthetic single chain variable fragment"

SEQ ID NO: 5596 - protein, 246 aa, Artificial Sequence
  source: /note="Description of Artificial Sequence: Synthetic single chain variable fragment"
EVQLVESGGGLVQPGGSLRLSCAASGFTFSSYAMSWVRQAPGKGLEWVSAISGSGGSTYYADSVKGRFTISRDNSKNTLYLQMNSLRAEDTAVYYCAKVEGSGSLDYWGQGTLVTVSSGGGGSGGGGSGGGGSEIVMTQSPGTLSLSPGERATLSCRASQSVSSAYLAWYQQKPGQPPRLLISGASTRATGIPDRFGGSGSGTDFTLTISRLEPEDFAVYYCQHYGSSFNGSSLFTFGQGTRLEIK

SEQ ID NO: 5597 - protein, 241 aa, Artificial Sequence; identical to SEQ ID NO: 5538
  source: /note="Description of Artificial Sequence: Synthetic single chain variable fragment"

SEQ ID NO: 5598 - protein, 248 aa, Artificial Sequence; identical to SEQ ID NO: 5539
  source: /note="Description of Artificial Sequence: Synthetic single chain variable fragment"

SEQ ID NO: 5599 - protein, 248 aa, Artificial Sequence; identical to SEQ ID NO: 5540
  source: /note="Description of Artificial Sequence: Synthetic single chain variable fragment"

SEQ ID NO: 5600 - protein, 239 aa, Artificial Sequence; identical to SEQ ID NO: 5556
  source: /note="Description of Artificial Sequence: Synthetic single chain variable fragment"

SEQ ID NO: 5601 - protein, 246 aa, Artificial Sequence; identical to SEQ ID NO: 5557
  source: /note="Description of Artificial Sequence: Synthetic single chain variable fragment"

SEQ ID NO: 5602 - protein, 241 aa, Artificial Sequence; identical to SEQ ID NO: 5542
  source: /note="Description of Artificial Sequence: Synthetic single chain variable fragment"

SEQ ID NO: 5603 - protein, 242 aa, Artificial Sequence; identical to SEQ ID NO: 5559
  source: /note="Description of Artificial Sequence: Synthetic single chain variable fragment"

SEQ ID NO: 5604 - protein, 248 aa, Artificial Sequence; identical to SEQ ID NO: 5543
  source: /note="Description of Artificial Sequence: Synthetic single chain variable fragment"

SEQ ID NO: 5605 - protein, 244 aa, Artificial Sequence; identical to SEQ ID NO: 5561
  source: /note="Description of Artificial Sequence: Synthetic single chain variable fragment"

SEQ ID NO: 5606 - protein, 244 aa, Artificial Sequence; identical to SEQ ID NO: 5562
  source: /note="Description of Artificial Sequence: Synthetic single chain variable fragment"

SEQ ID NO: 5607 - protein, 251 aa, Artificial Sequence; identical to SEQ ID NO: 5563
  source: /note="Description of Artificial Sequence: Synthetic single chain variable fragment"

SEQ ID NO: 5608 - protein, 246 aa, Artificial Sequence; identical to SEQ ID NO: 5564
  source: /note="Description of Artificial Sequence: Synthetic single chain variable fragment"

SEQ ID NO: 5609 - protein, 244 aa, Artificial Sequence; identical to SEQ ID NO: 5565
  source: /note="Description of Artificial Sequence: Synthetic single chain variable fragment"

SEQ ID NO: 5610 - protein, 249 aa, Artificial Sequence; identical to SEQ ID NO: 5566
  source: /note="Description of Artificial Sequence: Synthetic single chain variable fragment"

SEQ ID NO: 5611 - protein, 243 aa, Artificial Sequence; identical to SEQ ID NO: 5567
  source: /note="Description of Artificial Sequence: Synthetic single chain variable fragment"

SEQ ID NO: 5612 - protein, 243 aa, Artificial Sequence; identical to SEQ ID NO: 5568
  source: /note="Description of Artificial Sequence: Synthetic single chain variable fragment"

SEQ ID NO: 5613 - protein, 246 aa, Artificial Sequence; identical to SEQ ID NO: 5572
  source: /note="Description of Artificial Sequence: Synthetic single chain variable fragment"

SEQ ID NO: 5614 - protein, 244 aa, Artificial Sequence; identical to SEQ ID NO: 5573
  source: /note="Description of Artificial Sequence: Synthetic single chain variable fragment"

SEQ ID NO: 5615 - protein, 243 aa, Artificial Sequence; identical to SEQ ID NO: 5529
  source: /note="Description of Artificial Sequence: Synthetic single chain variable fragment"

SEQ ID NO: 5616 - protein, 249 aa, Artificial Sequence; identical to SEQ ID NO: 5575
  source: /note="Description of Artificial Sequence: Synthetic single chain variable fragment"

SEQ ID NO: 5617 - protein, 246 aa, Artificial Sequence; identical to SEQ ID NO: 5576
  source: /note="Description of Artificial Sequence: Synthetic single chain variable fragment"

SEQ ID NO: 5618 - protein, 247 aa, Artificial Sequence; identical to SEQ ID NO: 5577
  source: /note="Description of Artificial Sequence: Synthetic single chain variable fragment"

SEQ ID NO: 5619 - protein, 238 aa, Artificial Sequence; identical to SEQ ID NO: 5531
  source: /note="Description of Artificial Sequence: Synthetic single chain variable fragment"

SEQ ID NO: 5620 - protein, 239 aa, Artificial Sequence; identical to SEQ ID NO: 5532
  source: /note="Description of Artificial Sequence: Synthetic single chain variable fragment"

SEQ ID NO: 5621 - protein, 241 aa, Artificial Sequence; identical to SEQ ID NO: 5533
  source: /note="Description of Artificial Sequence: Synthetic single chain variable fragment"

SEQ ID NO: 5622 - protein, 239 aa, Artificial Sequence; identical to SEQ ID NO: 5581
  source: /note="Description of Artificial Sequence: Synthetic single chain variable fragment"

SEQ ID NO: 5623 - protein, 239 aa, Artificial Sequence; identical to SEQ ID NO: 5582
  source: /note="Description of Artificial Sequence: Synthetic single chain variable fragment"

SEQ ID NO: 5624 - protein, 246 aa, Artificial Sequence; identical to SEQ ID NO: 5583
  source: /note="Description of Artificial Sequence: Synthetic single chain variable fragment"

SEQ ID NO: 5625 - protein, 239 aa, Artificial Sequence; identical to SEQ ID NO: 5535
  source: /note="Description of Artificial Sequence: Synthetic single chain variable fragment"

SEQ ID NO: 5626 - protein, 240 aa, Artificial Sequence; identical to SEQ ID NO: 5536
  source: /note="Description of Artificial Sequence: Synthetic single chain variable fragment"

SEQ ID NO: 5627 - protein, 106 aa, Artificial Sequence; identical to SEQ ID NO: 5586
  source: /note="Description of Artificial Sequence: Synthetic single chain variable fragment"

SEQ ID NO: 5628 - protein, 246 aa, Artificial Sequence; identical to SEQ ID NO: 5572
  source: /note="Description of Artificial Sequence: Synthetic single chain variable fragment"

SEQ ID NO: 5629 - protein, 244 aa, Artificial Sequence; identical to SEQ ID NO: 5573
  source: /note="Description of Artificial Sequence: Synthetic single chain variable fragment"

SEQ ID NO: 5630 - protein, 243 aa, Artificial Sequence; identical to SEQ ID NO: 5529
  source: /note="Description of Artificial Sequence: Synthetic single chain variable fragment"

SEQ ID NO: 5631 - protein, 249 aa, Artificial Sequence; identical to SEQ ID NO: 5575
  source: /note="Description of Artificial Sequence: Synthetic single chain variable fragment"

SEQ ID NO: 5632 - protein, 246 aa, Artificial Sequence; identical to SEQ ID NO: 5576
  source: /note="Description of Artificial Sequence: Synthetic single chain variable fragment"

SEQ ID NO: 5633 - protein, 247 aa, Artificial Sequence; identical to SEQ ID NO: 5577
  source: /note="Description of Artificial Sequence: Synthetic single chain variable fragment"

SEQ ID NO: 5634 - protein, 238 aa, Artificial Sequence; identical to SEQ ID NO: 5531
  source: /note="Description of Artificial Sequence: Synthetic single chain variable fragment"

SEQ ID NO: 5635 - protein, 239 aa, Artificial Sequence; identical to SEQ ID NO: 5532
  source: /note="Description of Artificial Sequence: Synthetic single chain variable fragment"

SEQ ID NO: 5636 - protein, 241 aa, Artificial Sequence; identical to SEQ ID NO: 5533
  source: /note="Description of Artificial Sequence: Synthetic single chain variable fragment"

SEQ ID NO: 5637 - protein, 239 aa, Artificial Sequence; identical to SEQ ID NO: 5581
  source: /note="Description of Artificial Sequence: Synthetic single chain variable fragment"

SEQ ID NO: 5638 - protein, 239 aa, Artificial Sequence; identical to SEQ ID NO: 5582
  source: /note="Description of Artificial Sequence: Synthetic single chain variable fragment"

SEQ ID NO: 5639 - protein, 246 aa, Artificial Sequence; identical to SEQ ID NO: 5583
  source: /note="Description of Artificial Sequence: Synthetic single chain variable fragment"

SEQ ID NO: 5640 - protein, 239 aa, Artificial Sequence; identical to SEQ ID NO: 5535
  source: /note="Description of Artificial Sequence: Synthetic single chain variable fragment"

SEQ ID NO: 5641 - protein, 240 aa, Artificial Sequence; identical to SEQ ID NO: 5536
  source: /note="Description of Artificial Sequence: Synthetic single chain variable fragment"

SEQ ID NO: 5642 - protein, 241 aa, Artificial Sequence; identical to SEQ ID NO: 5537
  source: /note="Description of Artificial Sequence: Synthetic single chain variable fragment"

SEQ ID NO: 5643 - protein, 243 aa, Artificial Sequence; identical to SEQ ID NO: 5545
  source: /note="Description of Artificial Sequence: Synthetic single chain variable fragment"

SEQ ID NO: 5644 - protein, 244 aa, Artificial Sequence; identical to SEQ ID NO: 5546
  source: /note="Description of Artificial Sequence: Synthetic single chain variable fragment"

SEQ ID NO: 5645 - protein, 246 aa, Artificial Sequence; identical to SEQ ID NO: 5547
  source: /note="Description of Artificial Sequence: Synthetic single chain variable fragment"

SEQ ID NO: 5646 - protein, 240 aa, Artificial Sequence; identical to SEQ ID NO: 5548
  source: /note="Description of Artificial Sequence: Synthetic single chain variable fragment"

SEQ ID NO: 5647 - protein, 241 aa, Artificial Sequence; identical to SEQ ID NO: 5549
  source: /note="Description of Artificial Sequence: Synthetic single chain variable fragment"

SEQ ID NO: 5648 - protein, 245 aa, Artificial Sequence; identical to SEQ ID NO: 5550
  source: /note="Description of Artificial Sequence: Synthetic single chain variable fragment"

SEQ ID NO: 5649 - protein, 253 aa, Artificial Sequence; identical to SEQ ID NO: 5551
  source: /note="Description of Artificial Sequence: Synthetic single chain variable fragment"

SEQ ID NO: 5650 - protein, 248 aa, Artificial Sequence; identical to SEQ ID NO: 5552
  source: /note="Description of Artificial Sequence: Synthetic single chain variable fragment"

SEQ ID NO: 5651 - protein, 246 aa, Artificial Sequence; identical to SEQ ID NO: 5596
  source: /note="Description of Artificial Sequence: Synthetic single chain variable fragment"

SEQ ID NO: 5652 - protein, 241 aa, Artificial Sequence; identical to SEQ ID NO: 5538
  source: /note="Description of Artificial Sequence: Synthetic single chain variable fragment"

SEQ ID NO: 5653 - protein, 248 aa, Artificial Sequence
  source: /note="Description of Artificial Sequence: Synthetic single chain variable fragment"
QVQLVESGGGLVQPGGSLRLSCAASGFTFSSYAMSWVRQAPGKGLEWVSAISGSGGSTYYADSVKGRFTISRDNAKNSLYLQMNSLRAEDTAIYYCARATYKRELRYYYGMDVWGQGTMVTVSSGGGGSGGGGSGGGGSEIVMTQSPGTVSLSPGERATLSCRASQSVSSSFLAWYQQKPGQAPRLLIYGASSRATGIPDRFSGSGSGTDFTLTISRLEFEDSAVYYCQQYHSSPSWTFGQGTRLEIK

SEQ ID NO: 5654 - protein, 248 aa, Artificial Sequence
  source: /note="Description of Artificial Sequence: Synthetic single chain variable fragment"
EVQLVETGGGLVQPGGSLRLSCAASGFTFSSYAMSWVRQAPGKGLEWVSAISGSGGSTYYADSVKGRFTISRDNSKNTLYLQMNTLKAEDTAVYYCARATYKRELRYYYGMDVWGQGTTVTVSSGGGGSGGGGSGGGGSEIVLTQSPSTLSLSPGESATLSCRASQSVSTTFLAWYQQKPGQAPRLLIYGSSNRATGIPDRFSGSGSGTDFTLTIRRLEFEDFAVYYCQQYHSSPSWTFGQGTKVEIK

SEQ ID NO: 5655 - protein, 239 aa, Artificial Sequence; identical to SEQ ID NO: 5556
  source: /note="Description of Artificial Sequence: Synthetic single chain variable fragment"

SEQ ID NO: 5656 - protein, 246 aa, Artificial Sequence; identical to SEQ ID NO: 5557
  source: /note="Description of Artificial Sequence: Synthetic single chain variable fragment"

SEQ ID NO: 5657 - protein, 241 aa, Artificial Sequence; identical to SEQ ID NO: 5542
  source: /note="Description of Artificial Sequence: Synthetic single chain variable fragment"

SEQ ID NO: 5658 - protein, 242 aa, Artificial Sequence; identical to SEQ ID NO: 5559
  source: /note="Description of Artificial Sequence: Synthetic single chain variable fragment"

SEQ ID NO: 5659 - protein, 248 aa, Artificial Sequence; identical to SEQ ID NO: 5543
  source: /note="Description of Artificial Sequence: Synthetic single chain variable fragment"

SEQ ID NO: 5660 - protein, 244 aa, Artificial Sequence; identical to SEQ ID NO: 5561
  source: /note="Description of Artificial Sequence: Synthetic single chain variable fragment"

SEQ ID NO: 5661 - protein, 244 aa, Artificial Sequence; identical to SEQ ID NO: 5562
  source: /note="Description of Artificial Sequence: Synthetic single chain variable fragment"

SEQ ID NO: 5662 - protein, 251 aa, Artificial Sequence; identical to SEQ ID NO: 5563
  source: /note="Description of Artificial Sequence: Synthetic single chain variable fragment"

SEQ ID NO: 5663 - protein, 246 aa, Artificial Sequence; identical to SEQ ID NO: 5564
  source: /note="Description of Artificial Sequence: Synthetic single chain variable fragment"

SEQ ID NO: 5664 - protein, 249 aa, Artificial Sequence; identical to SEQ ID NO: 5570
  source: /note="Description of Artificial Sequence: Synthetic single chain variable fragment"

SEQ ID NO: 5665 - protein, 235 aa, Artificial Sequence
  source: /note="Description of Artificial Sequence: Synthetic single chain variable fragment"
DIELTQSPSSLAVSAGEKVTMSCKSSQSILYSSNQKNYLAWYQQKPGQSPKLLIYWASTRESGVPDRFTGSGSGTDFTLTISSVQAEDLAVYYCHQYLSSYTFGGGTKLEIKGGGGSQVQLQQSGPELVRPGASVRISCKASGYTFASYYIQWMKQRPGQGLEWIGWINPGNVNTKYNEKFKGKATLTADKSSTTAYMQLSSLTSEDSAVYFCARSTYYRPLDYWGQGTTVTVSS

SEQ ID NO: 5666 - protein, 245 aa, Artificial Sequence
  source: /note="Description of Artificial Sequence: Synthetic single chain variable fragment"
DIELTQSPSSLAVSAGEKVTMSCKSSQSILYSSNQKNYLAWYQQKPGQSPKLLIYWASTRESGVPDRFTGSGSGTDFTLTISSVQAEDLAVYYCHQYLSSYTFGGGTKLEIKGGGGSGGGGSGGGGSQVQLQQSGPELVRPGASVRISCKASGYTFASYYIQWMKQRPGQGLEWIGWINPGNVNTKYNEKFKGKATLTADKSSTTAYMQLSSLTSEDSAVYFCARSTYYRPLDYWGQGTTVTVSS

SEQ ID NO: 5667 - protein, 264 aa, Artificial Sequence
  source: /note="Description of Artificial Sequence: Synthetic single chain variable fragment"
MALPVTALLLPLALLLHAARPQVQLVQSGAEVKKPGASVKVSCKASGYTFTGYYMHWVRQAPGQGLEWMGWINPNSGGTNYAQKFQGRVTMTRDTSISTAYMELSRLRSDDTAVYYCARDMNILATVPFDIWGQGTMVTVSSGGGGSGGGGSGGGGSDIQMTQSPSSLSASVGDRVTITCRASQSISTYLNWYQQKPGKAPNLLIYAAFSLQSGVPSRFSGSGSGTDFTLTINSLQPEDFATYYCQQGDSVPLTFGGGTKLEIK

SEQ ID NO: 5668 - protein, 264 aa, Artificial Sequence
  source: /note="Description of Artificial Sequence: Synthetic single chain variable fragment"
MALPVTALLLPLALLLHAARPQVQLVQSGAEVKKPGASVKVSCKASGYTFTGYYMHWVRQAPGQGLEWMGWINPNSGGTNYAQKFQGRVTLTRDTSISTVYMELSRLRSDDTAVYYCARDMNILATVPFDIWGQGTMVTVSSGGGGSGGGGSGGGGSDIQMTQSPSSLSASVGDRVTITCRASQSISSYLNWYQQKPGKAPKLLIYAASSLQSGVPSRFSGSGSGTDFTLTVNSLQPEDFATYYCQQGDSVPLTFGGGTRLEIK

SEQ ID NO: 5669 - protein, 264 aa, Artificial Sequence
  source: /note="Description of Artificial Sequence: Synthetic single chain variable fragment"
MALPVTALLLPLALLLHAARPQVQLVQSGAEVKKPGASVKVSCKASGYIFTGYYIHWVRQAPGQGLEWMGWINPNSGGTNYAQKFQGRVTMTRDTSISTAYMELSGLRSDDPAVYYCARDMNILATVPFDIWGQGTLVTVSSGGGGSGGGGSGGGGSDIQLTQSPSSLSASVGDRVTITCRASQSISSYLNWYQQKPGKAPKLLIYAASSLQSGVPSRFSGSGSGTDFTLTVNSLQPEDFATYYCQQGDSVPLTFGGGTKVEIK

SEQ ID NO: 5670 - protein, 266 aa, Artificial Sequence
  source: /note="Description of Artificial Sequence: Synthetic single chain variable fragment"
MALPVTALLLPLALLLHAARPQVQLQQSGAEVKKSGASVKVSCKASGYTFTDYYMHWLRQAPGQGLEWMGWINPNSGDTNYAQKFQGRVTLTRDTSISTVYMELSRLRSDDTAVYYCARDMNILATVPFDIWGQGTMVTVSSASGGGGSGGRASGGGGSDIQMTQSPSSLSASVGDRVTITCRASQSISSYLNWYQQKPGKAPKLLIYAASSLQSGVPSRFSGSGSGTDFTLTISSLQPEDFATYYCQQGDSVPLTFGGGTKVEIK

SEQ ID NO: 5671 - protein, 263 aa, Artificial Sequence
  source: /note="Description of Artificial Sequence: Synthetic single chain variable fragment"
MALPVTALLLPLALLLHAARPQVQLVQSGAEVKKPGASVKVSCKASGYTFTSYWMNWVRQAPGQGLEWMGRIDPYDSETHYNQKFKDRVTMTVDKSTSTAYMELSSLRSEDTAVYYCARGNWDDYWGQGTTVTVSSGGGGSGGGGSGGGGSGGGGSDVQLTQSPSFLSASVGDRVTITCRASKSISKDLAWYQQKPGKAPKLLIYSGSTLQSGVPSRFSGSGSGTEFTLTISSLQPEDFATYYCQQHNKYPYTFGGGTKVEIK

SEQ ID NO: 5672 - protein, 263 aa, Artificial Sequence
  source: /note="Description of Artificial Sequence: Synthetic single chain variable fragment"
MALPVTALLLPLALLLHAARPQVQLVQSGAEVKKPGASVKVSCKASGYTFTSYWMNWVRQAPGQGLEWMGRIDPYDSETHYNQKFKDRVTMTVDKSTSTAYMELSSLRSEDTAVYYCARGNWDDYWGQGTTVTVSSGGGGSGGGGSGGGGSGGGGSEVVLTQSPATLSLSPGERATLSCRASKSISKDLAWYQQKPGQAPRLLIYSGSTLQSGIPARFSGSGSGTDFTLTISSLEPEDFAVYYCQQHNKYPYTFGGGTKVEIK

SEQ ID NO: 5673 - protein, 263 aa, Artificial Sequence
  source: /note="Description of Artificial Sequence: Synthetic single chain variable fragment"
MALPVTALLLPLALLLHAARPQVQLVQSGAEVKKPGASVKVSCKASGYTFTSYWMNWVRQAPGQGLEWMGRIDPYDSETHYNQKFKDRVTMTVDKSTSTAYMELSSLRSEDTAVYYCARGNWDDYWGQGTTVTVSSGGGGSGGGGSGGGGSGGGGSDVVMTQSPAFLSVTPGEKVTITCRASKSISKDLAWYQQKPDQAPKLLIYSGSTLQSGVPSRFSGSGSGTDFTFTISSLEAEDAATYYCQQHNKYPYTFGGGTKVEIK

SEQ ID NO: 5674 - protein, 263 aa, Artificial Sequence
  source: /note="Description of Artificial Sequence: Synthetic single chain variable fragment"
MALPVTALLLPLALLLHAARPQVQLVQSGAEVKKPGASVKVSCKASGYTFTSYWMNWVRQAPGQGLEWMGRIDPYDSETHYNQKFKDRVTMTVDKSTSTAYMELSSLRSEDTAVYYCARGNWDDYWGQGTTVTVSSGGGGSGGGGSGGGGSGGGGSDVVMTQSPDSLAVSLGERATINCRASKSISKDLAWYQQKPGQPPKLLIYSGSTLQSGVPDRFSGSGSGTDFTLTISSLQAEDVAVYYCQQHNKYPYTFGGGTKVEIK

SEQ ID NO: 5675 - protein, 263 aa, Artificial Sequence
  source: /note="Description of Artificial Sequence: Synthetic single chain variable fragment"
MALPVTALLLPLALLLHAARPDVQLTQSPSFLSASVGDRVTITCRASKSISKDLAWYQQKPGKAPKLLIYSGSTLQSGVPSRFSGSGSGTEFTLTISSLQPEDFATYYCQQHNKYPYTFGGGTKVEIKGGGGSGGGGSGGGGSGGGGSQVQLVQSGAEVKKPGASVKVSCKASGYTFTSYWMNWVRQAPGQGLEWMGRIDPYDSETHYNQKFKDRVTMTVDKSTSTAYMELSSLRSEDTAVYYCARGNWDDYWGQGTTVTVSS

SEQ ID NO: 5676 - protein, 263 aa, Artificial Sequence
  source: /note="Description of Artificial Sequence: Synthetic single chain variable fragment"
MALPVTALLLPLALLLHAARPEVVLTQSPATLSLSPGERATLSCRASKSISKDLAWYQQKPGQAPRLLIYSGSTLQSGIPARFSGSGSGTDFTLTISSLEPEDFAVYYCQQHNKYPYTFGGGTKVEIKGGGGSGGGGSGGGGSGGGGSQVQLVQSGAEVKKPGASVKVSCKASGYTFTSYWMNWVRQAPGQGLEWMGRIDPYDSETHYNQKFKDRVTMTVDKSTSTAYMELSSLRSEDTAVYYCARGNWDDYWGQGTTVTVSS

SEQ ID NO: 5677 - protein, 263 aa, Artificial Sequence
  source: /note="Description of Artificial Sequence: Synthetic single chain variable fragment"
MALPVTALLLPLALLLHAARPDVVMTQSPAFLSVTPGEKVTITCRASKSISKDLAWYQQKPDQAPKLLIYSGSTLQSGVPSRFSGSGSGTDFTFTISSLEAEDAATYYCQQHNKYPYTFGGGTKVEIKGGGGSGGGGSGGGGSGGGGSQVQLVQSGAEVKKPGASVKVSCKASGYTFTSYWMNWVRQAPGQGLEWMGRIDPYDSETHYNQKFKDRVTMTVDKSTSTAYMELSSLRSEDTAVYYCARGNWDDYWGQGTTVTVSS

SEQ ID NO: 5678 - protein, 263 aa, Artificial Sequence
  source: /note="Description of Artificial Sequence: Synthetic single chain variable fragment"
MALPVTALLLPLALLLHAARPDVVMTQSPDSLAVSLGERATINCRASKSISKDLAWYQQKPGQPPKLLIYSGSTLQSGVPDRFSGSGSGTDFTLTISSLQAEDVAVYYCQQHNKYPYTFGGGTKVEIKGGGGSGGGGSGGGGSGGGGSQVQLVQSGAEVKKPGASVKVSCKASGYTFTSYWMNWVRQAPGQGLEWMGRIDPYDSETHYNQKFKDRVTMTVDKSTSTAYMELSSLRSEDTAVYYCARGNWDDYWGQGTTVTVSS

SEQ ID NO: 5679 - protein, 263 aa, Artificial Sequence
  source: /note="Description of Artificial Sequence: Synthetic single chain variable fragment"
MALPVTALLLPLALLLHAARPQVQLVQSGSELKKPGASVKVSCKASGYTFTSYWMNWVRQAPGQGLEWMGRIDPYDSETHYNQKFKDRFVFSVDKSVSTAYLQISSLKAEDTAVYYCARGNWDDYWGQGTTVTVSSGGGGSGGGGSGGGGSGGGGSDVQLTQSPSFLSASVGDRVTITCRASKSISKDLAWYQQKPGKAPKLLIYSGSTLQSGVPSRFSGSGSGTEFTLTISSLQPEDFATYYCQQHNKYPYTFGGGTKVEIK

SEQ ID NO: 5680 - protein, 263 aa, Artificial Sequence
  source: /note="Description of Artificial Sequence: Synthetic single chain variable fragment"
MALPVTALLLPLALLLHAARPQVQLVQSGSELKKPGASVKVSCKASGYTFTSYWMNWVRQAPGQGLEWMGRIDPYDSETHYNQKFKDRFVFSVDKSVSTAYLQISSLKAEDTAVYYCARGNWDDYWGQGTTVTVSSGGGGSGGGGSGGGGSGGGGSEVVLTQSPATLSLSPGERATLSCRASKSISKDLAWYQQKPGQAPRLLIYSGSTLQSGIPARFSGSGSGTDFTLTISSLEPEDFAVYYCQQHNKYPYTFGGGTKVEIK

SEQ ID NO: 5681 - protein, 263 aa, Artificial Sequence
  source: /note="Description of Artificial Sequence: Synthetic single chain variable fragment"
MALPVTALLLPLALLLHAARPQVQLVQSGSELKKPGASVKVSCKASGYTFTSYWMNWVRQAPGQGLEWMGRIDPYDSETHYNQKFKDRFVFSVDKSVSTAYLQISSLKAEDTAVYYCARGNWDDYWGQGTTVTVSSGGGGSGGGGSGGGGSGGGGSDVVMTQSPAFLSVTPGEKVTITCRASKSISKDLAWYQQKPDQAPKLLIYSGSTLQSGVPSRFSGSGSGTDFTFTISSLEAEDAATYYCQQHNKYPYTFGGGTKVEIK

SEQ ID NO: 5682 - protein, 263 aa, Artificial Sequence
  source: /note="Description of Artificial Sequence: Synthetic single chain variable fragment"
MALPVTALLLPLALLLHAARPQVQLVQSGSELKKPGASVKVSCKASGYTFTSYWMNWVRQAPGQGLEWMGRIDPYDSETHYNQKFKDRFVFSVDKSVSTAYLQISSLKAEDTAVYYCARGNWDDYWGQGTTVTVSSGGGGSGGGGSGGGGSGGGGSDVVMTQSPDSLAVSLGERATINCRASKSISKDLAWYQQKPGQPPKLLIYSGSTLQSGVPDRFSGSGSGTDFTLTISSLQAEDVAVYYCQQHNKYPYTFGGGTKVEIK

SEQ ID NO: 5683 - protein, 263 aa, Artificial Sequence
  source: /note="Description of Artificial Sequence: Synthetic single chain variable fragment"
MALPVTALLLPLALLLHAARPDVQLTQSPSFLSASVGDRVTITCRASKSISKDLAWYQQKPGKAPKLLIYSGSTLQSGVPSRFSGSGSGTEFTLTISSLQPEDFATYYCQQHNKYPYTFGGGTKVEIKGGGGSGGGGSGGGGSGGGGSQVQLVQSGSELKKPGASVKVSCKASGYTFTSYWMNWVRQAPGQGLEWMGRIDPYDSETHYNQKFKDRFVFSVDKSVSTAYLQISSLKAEDTAVYYCARGNWDDYWGQGTTVTVSS

SEQ ID NO: 5684 - protein, 263 aa, Artificial Sequence
  source: /note="Description of Artificial Sequence: Synthetic single chain variable fragment"
MALPVTALLLPLALLLHAARPEVVLTQSPATLSLSPGERATLSCRASKSISKDLAWYQQKPGQAPRLLIYSGSTLQSGIPARFSGSGSGTDFTLTISSLEPEDFAVYYCQQHNKYPYTFGGGTKVEIKGGGGSGGGGSGGGGSGGGGSQVQLVQSGSELKKPGASVKVSCKASGYTFTSYWMNWVRQAPGQGLEWMGRIDPYDSETHYNQKFKDRFVFSVDKSVSTAYLQISSLKAEDTAVYYCARGNWDDYWGQGTTVTVSS

SEQ ID NO: 5685 - protein, 263 aa, Artificial Sequence
  source: /note="Description of Artificial Sequence: Synthetic single chain variable fragment"
MALPVTALLLPLALLLHAARPDVVMTQSPAFLSVTPGEKVTITCRASKSISKDLAWYQQKPDQAPKLLIYSGSTLQSGVPSRFSGSGSGTDFTFTISSLEAEDAATYYCQQHNKYPYTFGGGTKVEIKGGGGSGGGGSGGGGSGGGGSQVQLVQSGSELKKPGASVKVSCKASGYTFTSYWMNWVRQAPGQGLEWMGRIDPYDSETHYNQKFKDRFVFSVDKSVSTAYLQISSLKAEDTAVYYCARGNWDDYWGQGTTVTVSS

SEQ ID NO: 5686 - protein, 263 aa, Artificial Sequence
  source: /note="Description of Artificial Sequence: Synthetic single chain variable fragment"
MALPVTALLLPLALLLHAARPDVVMTQSPDSLAVSLGERATINCRASKSISKDLAWYQQKPGQPPKLLIYSGSTLQSGVPDRFSGSGSGTDFTLTISSLQAEDVAVYYCQQHNKYPYTFGGGTKVEIKGGGGSGGGGSGGGGSGGGGSQVQLVQSGSELKKPGASVKVSCKASGYTFTSYWMNWVRQAPGQGLEWMGRIDPYDSETHYNQKFKDRFVFSVDKSVSTAYLQISSLKAEDTAVYYCARGNWDDYWGQGTTVTVSS

SEQ ID NO: 5687 - protein, 263 aa, Artificial Sequence
  source: /note="Description of Artificial Sequence: Synthetic single chain variable fragment"
MALPVTALLLPLALLLHAARPEVQLVQSGAEVKKPGESLRISCKGSGYTFTSYWMNWVRQMPGKGLEWMGRIDPYDSETHYNQKFKDHVTISVDKSISTAYLQWSSLKASDTAMYYCARGNWDDYWGQGTTVTVSSGGGGSGGGGSGGGGSGGGGSDVQLTQSPSFLSASVGDRVTITCRASKSISKDLAWYQQKPGKAPKLLIYSGSTLQSGVPSRFSGSGSGTEFTLTISSLQPEDFATYYCQQHNKYPYTFGGGTKVEIK

SEQ ID NO: 5688 - protein, 263 aa, Artificial Sequence
  source: /note="Description of Artificial Sequence: Synthetic single chain variable fragment"
MALPVTALLLPLALLLHAARPEVQLVQSGAEVKKPGESLRISCKGSGYTFTSYWMNWVRQMPGKGLEWMGRIDPYDSETHYNQKFKDHVTISVDKSISTAYLQWSSLKASDTAMYYCARGNWDDYWGQGTTVTVSSGGGGSGGGGSGGGGSGGGGSEVVLTQSPATLSLSPGERATLSCRASKSISKDLAWYQQKPGQAPRLLIYSGSTLQSGIPARFSGSGSGTDFTLTISSLEPEDFAVYYCQQHNKYPYTFGGGTKVEIK

SEQ ID NO: 5689 - protein, 263 aa, Artificial Sequence
  source: /note="Description of Artificial Sequence: Synthetic single chain variable fragment"
MALPVTALLLPLALLLHAARPEVQLVQSGAEVKKPGESLRISCKGSGYTFTSYWMNWVRQMPGKGLEWMGRIDPYDSETHYNQKFKDHVTISVDKSISTAYLQWSSLKASDTAMYYCARGNWDDYWGQGTTVTVSSGGGGSGGGGSGGGGSGGGGSDVVMTQSPAFLSVTPGEKVTITCRASKSISKDLAWYQQKPDQAPKLLIYSGSTLQSGVPSRFSGSGSGTDFTFTISSLEAEDAATYYCQQHNKYPYTFGGGTKVEIK

SEQ ID NO: 5690 - protein, 263 aa, Artificial Sequence
  source: /note="Description of Artificial Sequence: Synthetic single chain variable fragment"
MALPVTALLLPLALLLHAARPEVQLVQSGAEVKKPGESLRISCKGSGYTFTSYWMNWVRQMPGKGLEWMGRIDPYDSETHYNQKFKDHVTISVDKSISTAYLQWSSLKASDTAMYYCARGNWDDYWGQGTTVTVSSGGGGSGGGGSGGGGSGGGGSDVVMTQSPDSLAVSLGERATINCRASKSISKDLAWYQQKPGQPPKLLIYSGSTLQSGVPDRFSGSGSGTDFTLTISSLQAEDVAVYYCQQHNKYPYTFGGGTKVEIK

SEQ ID NO: 5691 - protein, 263 aa, Artificial Sequence
  source: /note="Description of Artificial Sequence: Synthetic single chain variable fragment"
MALPVTALLLPLALLLHAARPDVQLTQSPSFLSASVGDRVTITCRASKSISKDLAWYQQKPGKAPKLLIYSGSTLQSGVPSRFSGSGSGTEFTLTISSLQPEDFATYYCQQHNKYPYTFGGGTKVEIKGGGGSGGGGSGGGGSGGGGSEVQLVQSGAEVKKPGESLRISCKGSGYTFTSYWMNWVRQMPGKGLEWMGRIDPYDSETHYNQKFKDHVTISVDKSISTAYLQWSSLKASDTAMYYCARGNWDDYWGQGTTVTVSS

SEQ ID NO: 5692 - protein, 263 aa, Artificial Sequence
  source: /note="Description of Artificial Sequence: Synthetic single chain variable fragment"
MALPVTALLLPLALLLHAARPEVVLTQSPATLSLSPGERATLSCRASKSISKDLAWYQQKPGQAPRLLIYSGSTLQSGIPARFSGSGSGTDFTLTISSLEPEDFAVYYCQQHNKYPYTFGGGTKVEIKGGGGSGGGGSGGGGSGGGGSEVQLVQSGAEVKKPGESLRISCKGSGYTFTSYWMNWVRQMPGKGLEWMGRIDPYDSETHYNQKFKDHVTISVDKSISTAYLQWSSLKASDTAMYYCARGNWDDYWGQGTTVTVSS

SEQ ID NO: 5693 - protein, 263 aa, Artificial Sequence
  source: /note="Description of Artificial Sequence: Synthetic single chain variable fragment"
MALPVTALLLPLALLLHAARPDVVMTQSPAFLSVTPGEKVTITCRASKSISKDLAWYQQKPDQAPKLLIYSGSTLQSGVPSRFSGSGSGTDFTFTISSLEAEDAATYYCQQHNKYPYTFGGGTKVEIKGGGGSGGGGSGGGGSGGGGSEVQLVQSGAEVKKPGESLRISCKGSGYTFTSYWMNWVRQMPGKGLEWMGRIDPYDSETHYNQKFKDHVTISVDKSISTAYLQWSSLKASDTAMYYCARGNWDDYWGQGTTVTVSS

SEQ ID NO: 5694 - protein, 263 aa, Artificial Sequence
  source: /note="Description of Artificial Sequence: Synthetic single chain variable fragment"
MALPVTALLLPLALLLHAARPDVVMTQSPDSLAVSLGERATINCRASKSISKDLAWYQQKPGQPPKLLIYSGSTLQSGVPDRFSGSGSGTDFTLTISSLQAEDVAVYYCQQHNKYPYTFGGGTKVEIKGGGGSGGGGSGGGGSGGGGSEVQLVQSGAEVKKPGESLRISCKGSGYTFTSYWMNWVRQMPGKGLEWMGRIDPYDSETHYNQKFKDHVTISVDKSISTAYLQWSSLKASDTAMYYCARGNWDDYWGQGTTVTVSS

SEQ ID NO: 5695 - protein, 263 aa, Artificial Sequence
  source: /note="Description of Artificial Sequence: Synthetic single chain variable fragment"
MALPVTALLLPLALLLHAARPEVQLVESGGGLVQPGGSLRLSCAASGYTFTSYWMNWVRQAPGKGLVWVSRIDPYDSETHYNQKFKDRFTISVDKAKSTAYLQMNSLRAEDTAVYYCARGNWDDYWGQGTTVTVSSGGGGSGGGGSGGGGSGGGGSDVQLTQSPSFLSASVGDRVTITCRASKSISKDLAWYQQKPGKAPKLLIYSGSTLQSGVPSRFSGSGSGTEFTLTISSLQPEDFATYYCQQHNKYPYTFGGGTKVEIK

SEQ ID NO: 5696 - protein, 263 aa, Artificial Sequence
  source: /note="Description of Artificial Sequence: Synthetic single chain variable fragment"
MALPVTALLLPLALLLHAARPEVQLVESGGGLVQPGGSLRLSCAASGYTFTSYWMNWVRQAPGKGLVWVSRIDPYDSETHYNQKFKDRFTISVDKAKSTAYLQMNSLRAEDTAVYYCARGNWDDYWGQGTTVTVSSGGGGSGGGGSGGGGSGGGGSEVVLTQSPATLSLSPGERATLSCRASKSISKDLAWYQQKPGQAPRLLIYSGSTLQSGIPARFSGSGSGTDFTLTISSLEPEDFAVYYCQQHNKYPYTFGGGTKVEIK

SEQ ID NO: 5697 - protein, 263 aa, Artificial Sequence
  source: /note="Description of Artificial Sequence: Synthetic single chain variable fragment"
MALPVTALLLPLALLLHAARPEVQLVESGGGLVQPGGSLRLSCAASGYTFTSYWMNWVRQAPGKGLVWVSRIDPYDSETHYNQKFKDRFTISVDKAKSTAYLQMNSLRAEDTAVYYCARGNWDDYWGQGTTVTVSSGGGGSGGGGSGGGGSGGGGSDVVMTQSPAFLSVTPGEKVTITCRASKSISKDLAWYQQKPDQAPKLLIYSGSTLQSGVPSRFSGSGSGTDFTFTISSLEAEDAATYYCQQHNKYPYTFGGGTKVEIK

SEQ ID NO: 5698 - protein, 263 aa, Artificial Sequence
  source: /note="Description of Artificial Sequence: Synthetic single chain variable fragment"
MALPVTALLLPLALLLHAARPEVQLVESGGGLVQPGGSLRLSCAASGYTFTSYWMNWVRQAPGKGLVWVSRIDPYDSETHYNQKFKDRFTISVDKAKSTAYLQMNSLRAEDTAVYYCARGNWDDYWGQGTTVTVSSGGGGSGGGGSGGGGSGGGGSDVVMTQSPDSLAVSLGERATINCRASKSISKDLAWYQQKPGQPPKLLIYSGSTLQSGVPDRFSGSGSGTDFTLTISSLQAEDVAVYYCQQHNKYPYTFGGGTKVEIK

SEQ ID NO: 5699 - protein, 263 aa, Artificial Sequence
  source: /note="Description of Artificial Sequence: Synthetic single chain variable fragment"
MALPVTALLLPLALLLHAARPDVQLTQSPSFLSASVGDRVTITCRASKSISKDLAWYQQKPGKAPKLLIYSGSTLQSGVPSRFSGSGSGTEFTLTISSLQPEDFATYYCQQHNKYPYTFGGGTKVEIKGGGGSGGGGSGGGGSGGGGSEVQLVESGGGLVQPGGSLRLSCAASGYTFTSYWMNWVRQAPGKGLVWVSRIDPYDSETHYNQKFKDRFTISVDKAKSTAYLQMNSLRAEDTAVYYCARGNWDDYWGQGTTVTVSS

SEQ ID NO: 5700 - protein, 263 aa, Artificial Sequence
  source: /note="Description of Artificial Sequence: Synthetic single chain variable fragment"
MALPVTALLLPLALLLHAARPEVVLTQSPATLSLSPGERATLSCRASKSISKDLAWYQQKPGQAPRLLIYSGSTLQSGIPARFSGSGSGTDFTLTISSLEPEDFAVYYCQQHNKYPYTFGGGTKVEIKGGGGSGGGGSGGGGSGGGGSEVQLVESGGGLVQPGGSLRLSCAASGYTFTSYWMNWVRQAPGKGLVWVSRIDPYDSETHYNQKFKDRFTISVDKAKSTAYLQMNSLRAEDTAVYYCARGNWDDYWGQGTTVTVSS

SEQ ID NO: 5701 - protein, 263 aa, Artificial Sequence
  source: /note="Description of Artificial Sequence: Synthetic single chain variable fragment"
MALPVTALLLPLALLLHAARPDVVMTQSPAFLSVTPGEKVTITCRASKSISKDLAWYQQKPDQAPKLLIYSGSTLQSGVPSRFSGSGSGTDFTFTISSLEAEDAATYYCQQHNKYPYTFGGGTKVEIKGGGGSGGGGSGGGGSGGGGSEVQLVESGGGLVQPGGSLRLSCAASGYTFTSYWMNWVRQAPGKGLVWVSRIDPYDSETHYNQKFKDRFTISVDKAKSTAYLQMNSLRAEDTAVYYCARGNWDDYWGQGTTVTVSS

SEQ ID NO: 5702 - protein, 263 aa, Artificial Sequence
  source: /note="Description of Artificial Sequence: Synthetic single chain variable fragment"
MALPVTALLLPLALLLHAARPDVVMTQSPDSLAVSLGERATINCRASKSISKDLAWYQQKPGQPPKLLIYSGSTLQSGVPDRFSGSGSGTDFTLTISSLQAEDVAVYYCQQHNKYPYTFGGGTKVEIKGGGGSGGGGSGGGGSGGGGSEVQLVESGGGLVQPGGSLRLSCAASGYTFTSYWMNWVRQAPGKGLVWVSRIDPYDSETHYNQKFKDRFTISVDKAKSTAYLQMNSLRAEDTAVYYCARGNWDDYWGQGTTVTVSS

SEQ ID NO: 5703 - protein, 282 aa, Artificial Sequence
  source: /note="Description of Artificial Sequence: Synthetic single chain variable fragment"
MALPVTALLLPLALLLHAARPEVKLVESGGGLVQPGGSLSLSCAASGFTFTDYYMSWVRQPPGKALEWLALIRSKADGYTTEYSASVKGRFTLSRDDSQSILYLQMNALRPEDSATYYCARDAAYYSYYSPEGAMDYWGQGTSVTVSSGGGGSGGGGSGGGGSMADYKDIVMTQSHKFMSTSVGDRVNITCKASQNVDSAVAWYQQKPGQSPKALIYSASYRYSGVPDRFTGRGSGTDFTLTISSVQAEDLAVYYCQQYYSTPWTFGGGTKLEIKRSDPTSS

SEQ ID NO: 5704 - protein, 243 aa, Artificial Sequence
  source: /note="Description of Artificial Sequence: Synthetic single chain variable fragment"
QVQLVQSGAEVKKPGASVKVSCKASGYTFTGYYMHWVRQAPGQGLEWMGWINPNSGGTNYAQKFQGRVTMTRDTSISTAYMELSRLRSDDTAVYYCARDMNILATVPFDIWGQGTMVTVSSGGGGSGGGGSGGGGSDIQMTQSPSSLSASVGDRVTITCRASQSISTYLNWYQQKPGKAPNLLIYAAFSLQSGVPSRFSGSGSGTDFTLTINSLQPEDFATYYCQQGDSVPLTFGGGTKLEIK

SEQ ID NO: 5705 - protein, 243 aa, Artificial Sequence
  source: /note="Description of Artificial Sequence: Synthetic single chain variable fragment"
QVQLVQSGAEVKKPGASVKVSCKASGYTFTGYYMHWVRQAPGQGLEWMGWINPNSGGTNYAQKFQGRVTLTRDTSISTVYMELSRLRSDDTAVYYCARDMNILATVPFDIWGQGTMVTVSSGGGGSGGGGSGGGGSDIQMTQSPSSLSASVGDRVTITCRASQSISSYLNWYQQKPGKAPKLLIYAASSLQSGVPSRFSGSGSGTDFTLTVNSLQPEDFATYYCQQGDSVPLTFGGGTRLEIK

SEQ ID NO: 5706 - protein, 243 aa, Artificial Sequence
  source: /note="Description of Artificial Sequence: Synthetic single chain variable fragment"
QVQLVQSGAEVKKPGASVKVSCKASGYIFTGYYIHWVRQAPGQGLEWMGWINPNSGGTNYAQKFQGRVTMTRDTSISTAYMELSGLRSDDPAVYYCARDMNILATVPFDIWGQGTLVTVSSGGGGSGGGGSGGGGSDIQLTQSPSSLSASVGDRVTITCRASQSISSYLNWYQQKPGKAPKLLIYAASSLQSGVPSRFSGSGSGTDFTLTVNSLQPEDFATYYCQQGDSVPLTFGGGTKVEIK

SEQ ID NO: 5707 - protein, 245 aa, Artificial Sequence
  source: /note="Description of Artificial Sequence: Synthetic single chain variable fragment"
QVQLQQSGAEVKKSGASVKVSCKASGYTFTDYYMHWLRQAPGQGLEWMGWINPNSGDTNYAQKFQGRVTLTRDTSISTVYMELSRLRSDDTAVYYCARDMNILATVPFDIWGQGTMVTVSSASGGGGSGGRASGGGGSDIQMTQSPSSLSASVGDRVTITCRASQSISSYLNWYQQKPGKAPKLLIYAASSLQSGVPSRFSGSGSGTDFTLTISSLQPEDFATYYCQQGDSVPLTFGGGTKVEIK

SEQ ID NO: 5708 - protein, 244 aa, Artificial Sequence
  source: /note="Description of Artificial Sequence: Synthetic single chain variable fragment"
DIVLTQSPASLAVSLGQRATISCRASESVDNYGNTFMHWYQQKPGQPPKLLIYRASNLESGIPARFSGSGSRTDFTLTINPVEADDVATYYCQQSNEDPPTFGAGTKLELKGGGGSGGGGSSGGGSQIQLVQSGPELKKPGETVKISCKASGYIFTNYGMNWVKQAPGKSFKWMGWINTYTGESTYSADFKGRFAFSLETSASTAYLHINDLKNEDTATYFCARSGGYDPMDYWGQGTSVTVSS

SEQ ID NO: 5709 - protein, 282 aa, Artificial Sequence; identical to SEQ ID NO: 5703
  source: /note="Description of Artificial Sequence: Synthetic single chain variable fragment"

SEQ ID NO: 5710 - protein, 237 aa, Artificial Sequence
  source: /note="Description of Artificial Sequence: Synthetic single chain variable fragment"
DVQITQSPSYLAASPGETITINCRASKSISKDLAWYQEKPGKTNKLLIYSGSTLQSGIPSRFSGSGSGTDFTLTISSLEPEDFAMYYCQQHNKYPYTFGGGTKLEIKGGGGSGGGGSSGGGSQVQLQQPGAELVRPGASVKLSCKASGYTFTSYWMNWVKQRPDQGLEWIGRIDPYDSETHYNQKFKDKAILTVDKSSSTAYMQLSSLTSEDSAVYYCARGNWDDYWGQGTTLTVSS

SEQ ID NO: 5711 - protein, 249 aa, Artificial Sequence
  source: /note="Description of Artificial Sequence: Synthetic single chain variable fragment"
DIVLTQSPDSLAVSLGERATINCRASESVDNYGNTFMHWYQQKPGQPPKLLIYRASNLESGVPDRFSGSGSRTDIFITISSLQAEDVAVYYCQQSNEDPPTFGQGTKLEIKGGGGSGGGGSGGGGSGGGGSQIQLVQSGSELKKPGASVKVSCKASGYIFTNYGMNWVRQAPGQGLEWMGWINTYTGESTYSADFKGRFVFSLDTSVSTAYLQINALKAEDTAVYYCARSGGYDPMDYWGQGTTVTVSS

SEQ ID NO: 5712 - protein, 249 aa, Artificial Sequence
  source: /note="Description of Artificial Sequence: Synthetic single chain variable fragment"
DIVLTQSPDSLAVSLGERATINCRASESVDNYGNTFMHWYQQKPGQPPKLLIYRASNLESGVPDRFSGSGSRTDFTLTISSLQAEDVAVYYCQQSNEDPPTFGQGTKLEIKGGGGSGGGGSGGGGSGGGGSQIQLVQSGAEVKKPGASVKVSCKASGYIFTNYGMNWVRQAPGQRLEWMGWINTYTGESTYSADFKGRVTITLDTSASTAYMELSSLRSEDTAVYYCARSGGYDPMDYWGQGTTVTVSS

SEQ ID NO: 5713 - protein, 249 aa, Artificial Sequence
  source: /note="Description of Artificial Sequence: Synthetic single chain variable fragment"
EIVLTQSPATLSLSPGERATLSCRASESVDNYGNTFMHWYQQKPGQAPRLLIYRASNLESGIPARFSGSGSRTDFTLTISSLEPEDVAVYYCQQSNEDPPTFGQGTKLEIKGGGGSGGGGSGGGGSGGGGSQIQLVQSGSELKKPGASVKVSCKASGYIFTNYGMNWVRQAPGQGLEWMGWINTYTGESTYSADFKGRFVFSLDTSVSTAYLQINALKAEDTAVYYCARSGGYDPMDYWGQGTTVTVSS

SEQ ID NO: 5714 - protein, 249 aa, Artificial Sequence
  source: /note="Description of Artificial Sequence: Synthetic single chain variable fragment"
EIVLTQSPATLSLSPGERATLSCRASESVDNYGNTFMHWYQQKPGQAPRLLIYRASNLESGIPARFSGSGSRTDFTLTISSLEPEDVAVYYCQQSNEDPPTFGQGTKLEIKGGGGSGGGGSGGGGSGGGGSQIQLVQSGAEVKKPGASVKVSCKASGYIFTNYGMNWVRQAPGQRLEWMGWINTYTGESTYSADFKGRVTITLDTSASTAYMELSSLRSEDTAVYYCARSGGYDPMDYWGQGTTVTVSS

SEQ ID NO: 5715 - protein, 249 aa, Artificial Sequence
  source: /note="Description of Artificial Sequence: Synthetic single chain variable fragment"
QIQLVQSGSELKKPGASVKVSCKASGYIFTNYGMNWVRQAPGQGLEWMGWINTYTGESTYSADFKGRFVFSLDTSVSTAYLQINALKAEDTAVYYCARSGGYDPMDYWGQGTTVTVSSGGGGSGGGGSGGGGSGGGGSDIVLTQSPDSLAVSLGERATINCRASESVDNYGNTFMHWYQQKPGQPPKLLIYRASNLESGVPDRFSGSGSRTDFTLTISSLQAEDVAVYYCQQSNEDPPTFGQGTKLEIK

SEQ ID NO: 5716 - protein, 249 aa, Artificial Sequence
  source: /note="Description of Artificial Sequence: Synthetic single chain variable fragment"
QIQLVQSGSELKKPGASVKVSCKASGYIFTNYGMNWVRQAPGQGLEWMGWINTYTGESTYSADFKGRFVFSLDTSVSTAYLQINALKAEDTAVYYCARSGGYDPMDYWGQGTTVTVSSGGGGSGGGGSGGGGSGGGGSEIVLTQSPATLSLSPGERATLSCRASESVDNYGNTFMHWYQQKPGQAPRLLIYRASNLESGIPARFSGSGSRTDFTLTISSLEPEDVAVYYCQQSNEDPPTFGQGTKLEIK

SEQ ID NO: 5717 - protein, 249 aa, Artificial Sequence
  source: /note="Description of Artificial Sequence: Synthetic single chain variable fragment"
QIQLVQSGAEVKKPGASVKVSCKASGYIFTNYGMNWVRQAPGQRLEWMGWINTYTGESTYSADFKGRVTITLDTSASTAYMELSSLRSEDTAVYYCARSGGYDPMDYWGQGTTVTVSSGGGGSGGGGSGGGGSGGGGSDIVLTQSPDSLAVSLGERATINCRASESVDNYGNTFMHWYQQKPGQPPKLLIYRASNLESGVPDRFSGSGSRTDFTLTISSLQAEDVAVYYCQQSNEDPPTFGQGTKLEIK

SEQ ID NO: 5718 - protein, 249 aa, Artificial Sequence
  source: /note="Description of Artificial Sequence: Synthetic single chain variable fragment"
QIQLVQSGAEVKKPGASVKVSCKASGYIFTNYGMNWVRQAPGQRLEWMGWINTYTGESTYSADFKGRVTITLDTSASTAYMELSSLRSEDTAVYYCARSGGYDPMDYWGQGTTVTVSSGGGGSGGGGSGGGGSGGGGSEIVLTQSPATLSLSPGERATLSCRASESVDNYGNTFMHWYQQKPGQAPRLLIYRASNLESGIPARFSGSGSRTDFTLTISSLEPEDVAVYYCQQSNEDPPTFGQGTKLEIK

SEQ ID NO: 5719 - protein, 247 aa, Artificial Sequence
  source: /note="Description of Artificial Sequence: Synthetic single chain variable fragment"
DIQMTQSTSSLSASLGDRVTISCSASQGINNYLNWYQQKPDGTVELLIYYTSTLQSGVPSRFSGSGSGTDYSLTISNLEPEDIGTYYCQQYSKLPRTFGGGTKLEIKGSTSGSGKPGSSEGSTKGQVQLQQSGSELMMPGASVKISCKATGYTFSNYWIEWVKQRPGHGLEWIGEILPGTGRTIYNEKFKGKATFTADISSNTVQMQLSSLTSEDSAVYYCARRDYYGNFYYAMDYWGQGTSVTVSS

SEQ ID NO: 5720 - protein, 263 aa, Artificial Sequence
  source: /note="Description of Artificial Sequence: Synthetic single chain variable fragment"
WSHPQFEKGGGGSGGGGSDIQMTQTTSSLSASLGDRVTISCRASQDISKYLNWYQQKPDGTVKLLIYHTSRLHSGVPSRFSGSGSGTDYSLTISNLEQEDIATYFCQQGNTLPYTFGGGTKLEITGSTSGSGKPGSGEGSTKGEVKLQESGPGLVAPSQSLSVTCTVSGVSLPDYGVSWIRQPPRKGLEWLGVIWGSETTYYNSALKSRLTIIKDNSKSQVFLKMNSLQTDDTAIYYCAKHYYYGGSYAMDYWGQGTSVTVSS

SEQ ID NO: 5721 - protein, 247 aa, Artificial Sequence
  source: /note="Description of Artificial Sequence: Synthetic single chain variable fragment"
DIQMTQTTSSLSASLGDRVTISCRASQDISKYLNWYQQKPDGTVKLLIYHTSRLHSGVPSRFSGSGSGTDYSLTISNLEQEDIATYFCQQGNTLPYTFGGGTKLEITGGSGSGNWSHPQFEKGSGSGEVKLQESGPGLVAPSQSLSVTCTVSGVSLPDYGVSWIRQPPRKGLEWLGVIWGSETTYYNSALKSRLTIIKDNSKSQVFLKMNSLQTDDTAIYYCAKHYYYGGSYAMDYWGQGTSVTVSS

SEQ ID NO: 5722 - protein, 242 aa, Artificial Sequence
  source: /note="Description of Artificial Sequence: Synthetic single chain variable fragment"
EIVMTQSPATLSLSPGERATLSCRASQDISKYLNWYQQKPGQAPRLLIYHTSRLHSGIPARFSGSGSGTDYTLTISSLQPEDFAVYFCQQGNTLPYTFGQGTKLEIKGGGGSGGGGSGGGGSQVQLQESGPGLVKPSETLSLTCTVSGVSLPDYGVSWIRQPPGKGLEWIGVIWGSETTYYSSSLKSRVTISKDNSKNQVSLKLSSVTAADTAVYYCAKHYYYGGSYAMDYWGQGTLVTVSS

SEQ ID NO: 5723 - protein, 247 aa, Artificial Sequence
  source: /note="Description of Artificial Sequence: Synthetic single chain variable fragment"
QVQLQESGPGLVKPSETLSLTCTVSGVSLPDYGVSWIRQPPGKGLEWIGVIWGSETTYYNSSLKSRVTISKDNSKNQVSLKLSSVTAADTAVYYCAKHYYYGGSYAMDYWGQGTLVTVSSGGGGSGGGGSGGGGSGGGGSEIVMTQSPATLSLSPGERATLSCRASQDISKYLNWYQQKPGQAPRLLIYHTSRLHSGIPARFSGSGSGTDYTLTISSLQPEDFAVYFCQQGNTLPYTFGQGTKLEIK

SEQ ID NO: 5724 - protein, 248 aa, Artificial Sequence
  source: /note="Description of Artificial Sequence: Synthetic single chain variable fragment"
EVQLVESGGGLVQPGRSLRLSCAASGFTFDDYAMHWVRQAPGKGLEWVSGISWNSGRIGYADSVKGRFTISRDNAKNSLFLQMNSLRAEDTAVYYCARDQGYHYYDSAEHAFDIWGQGTMVTVSSGGGGSGGGGSGGGGSSYELTQDPAVSVALGQTVRITCQGDSLRSYYASWYQQKPGQAPVLVIYDKNNRPSGIPDRFSGSSSGNTASLTITGAQAEDEADYYCNSRDSSGNNWVFGGGTKLTVL

SEQ ID NO: 5725 - protein, 242 aa, Artificial Sequence
  source: /note="Description of Artificial Sequence: Synthetic single chain variable fragment"
EIVMTQSPATLSLSPGERATLSCRASQDISKYLNWYQQKPGQAPRLLIYHTSRLHSGIPARFSGSGSGTDYTLTISSLQPEDFAVYFCQQGNTLPYTFGQGTKLEIKGGGGSGGGGSGGGGSQVQLQESGPGLVKPSETLSLTCTVSGVSLPDYGVSWIRQPPGKGLEWIGVIWGSETTYYNSSLKSRVTISKDNSKNQVSLKLSSVTAADTAVYYCAKHYYYGGSYAMDYWGQGTLVTVSS

SEQ ID NO: 5726 - protein, 242 aa, Artificial Sequence
  source: /note="Description of Artificial Sequence: Synthetic single chain variable fragment"
QVQLQESGPGLVKPSETLSLTCTVSGVSLPDYGVSWIRQPPGKGLEWIGVIWGSETTYYNSSLKSRVTISKDNSKNQVSLKLSSVTAADTAVYYCAKHYYYGGSYAMDYWGQGTLVTVSSGGGGSGGGGSGGGGSEIVMTQSPATLSLSPGERATLSCRASQDISKYLNWYQQKPGQAPRLLIYHTSRLHSGIPARFSGSGSGTDYTLTISSLQPEDFAVYFCQQGNTLPYTFGQGTKLEIK

SEQ ID NO: 5727 - protein, 242 aa, Artificial Sequence
  source: /note="Description of Artificial Sequence: Synthetic single chain variable fragment"
EIVMTQSPATLSLSPGERATLSCRASQDISKYLNWYQQKPGQAPRLLIYHTSRLHSGIPARFSGSGSGTDYTLTISSLQPEDFAVYFCQQGNTLPYTFGQGTKLEIKGGGGSGGGGSGGGGSQVQLQESGPGLVKPSETLSLTCTVSGVSLPDYGVSWIRQPPGKGLEWIGVIWGSETTYYQSSLKSRVTISKDNSKNQVSLKLSSVTAADTAVYYCAKHYYYGGSYAMDYWGQGTLVTVSS

SEQ ID NO: 5728 - protein, 246 aa, Artificial Sequence
  source: /note="Description of Artificial Sequence: Synthetic single chain variable fragment"
EVQLVESGGGLVQPGRSLRLSCAASGFTFDDYAMHWVRQAPGKGLEWVSGISWNSGRIGYADSVKGRFTISRDNAKNSLFLQMNSLRAEDTAVYYCARDQGYHYYDSAEHAFDIWGQGTVVTVSSGGGGSGGGGSGGGGSQSALTQPRSVSGFPGQSVTISCTGTTSDDVSWYQQHPGKAPQLMLYDVSKRPSGVPHRFSGSRSGRAASLIISGLQTEDEADYFCCSYAGRYNSVLFGGGTKLTVL

SEQ ID NO: 5729 - protein, 252 aa, Artificial Sequence
  source: /note="Description of Artificial Sequence: Synthetic single chain variable fragment"
QITLKESGPTLVKPTQTLTLTCTFSGFSLSTSGVGVGWIRQPPGKALEWLALIYWDDDKRYSPSLKSRLTITKDTSKNQVVLTMTNMDPVDTATYYCAHIDYGSGSYSPRTSYYYYMSVWGKGTTVTVSSGGGGSGGGGSGGGGSAIQLTQSPSFLSASVGDRVTITCRASQGISSYLNWYQQRAGKAPELLIYAASNLQSGVPSRFSGSGSGTDFTLTITSVQPEDFATYFCQQGDAFPLTFGPGTKVTIR

SEQ ID NO: 5730 - protein, 249 aa, Artificial Sequence
  source: /note="Description of Artificial Sequence: Synthetic single chain variable fragment"
QVQLVQSGGGVVQPGRSLRLSCAASGFTFDDYAMHWVRQAPGKGLEWVSGISWNSGSIGYADSVKGRFTISRDNAKNSLYLQMNSLRAEDTAVYYCARDQGYHYYDSAEHAFDIWGQGTVVTVSSGGGGSGGGGSGGGGSEIVLTQSPATLSLSPGETATLSCRASQSINHYLAWYQQKPGQAPRLLIYDASNRATGIPARFSGSGSGTDFTLTISSLEPEDFATYYCQQSYSHPRMYTFGQGTKLEIK

SEQ ID NO: 5731 - protein, 249 aa, Artificial Sequence
  source: /note="Description of Artificial Sequence: Synthetic single chain variable fragment"
EVQLVQSGGGLVQPGRSLRLSCAASGFTFDDYAMHWVRQAPGKGLEWVSGISWNSGSIGYADSVKGRFTISRDNAKNSLYLQMNSLRAEDTAVYYCARDQGYHYYDSAEHAFDIWGQGTVVTVSSGGGGSGGGGSGGGGSAIRMTQSPSSLSASVGDRVTVTCQASQDISNYLNWYQQKPGRAPKLLIYDASNVKAGVPSRFSGGGSGTDFTLTISSLQPEDFATYYCQQSYSTPQAYTFGQGTKLDIK

SEQ ID NO: 5732 - protein, 251 aa, Artificial Sequence
  source: /note="Description of Artificial Sequence: Synthetic single chain variable fragment"
EVQLVESGGGLVQPGRSLRLSCAASGFTFDDYAMHWVRQAPGKGLEWVSGISWNSGRIGYADSVKGRFTISRDNAKNSLFLQMNSLRAEDTAVYYCARDQGYHYYDSAEHAFDIWGQGTVVTVSSGGGGSGGGGSGGGGSQSVLTQPPSVSAAPGQKVTISCSGSSSNIGNNYVSWYQQLPGTAPKLLIYDNNKRPSGIPDRFSGSKSGTSATLGITGLQTGDEADYYCGTWDSSLNRDWVFGGGTKLTVL

SEQ ID NO: 5733 - protein, 252 aa, Artificial Sequence
  source: /note="Description of Artificial Sequence: Synthetic single chain variable fragment"
QVQLVESGGGLVQPGRSLRLSCAASGFTFDDYAMHWVRQAPGKGLEWVSGISWNSGRIGYADSVKGRFTISRDNAKNSLFLQMNSLRAEDTAVYYCARDQGYHYYDSAEHAFDIWGQGTVVTVSSGGGGSGGGGSGGGGSQSALTQPASVSGSPGQSITISCTGTSSDLGGYNYVSWYQHRPGKAPKLIIYDVTVRPSGVSDRFSGSKSGNTASLTISGLQAEDEADYYCGSYTSSSTLLWVFGGGTKLTVL

SEQ ID NO: 5734 - protein, 252 aa, Artificial Sequence; identical to SEQ ID NO: 5733
  source: /note="Description of Artificial Sequence: Synthetic single chain variable fragment"

SEQ ID NO: 5735 - protein, 252 aa, Artificial Sequence
  source: /note="Description of Artificial Sequence: Synthetic single chain variable fragment"
EVQLVESGGGLVQPGRSLRLSCAASGFTFDDYAMHWVRQAPGKGLEWVSGISWNSGRIGYADSVKGRFTISRDNAKNSLFLQMNSLRAEDTAVYYCARDQGYHYYDSAEHAFDIWGQGTVVTVSSGGGGSGGGGSGGGGSQSALTQPASVSGSPGQSITISCTGTSSDLGGYNYVSWYQHRPGKAPKLIIYDVTVRPSGVSDRFSGSKSGNTASLTISGLQAEDEADYYCGSYTSSSTLLWVFGGGTKLTVL

SEQ ID NO: 5736 - protein, 252 aa, Artificial Sequence; identical to SEQ ID NO: 5735
  source: /note="Description of Artificial Sequence: Synthetic single chain variable fragment"

SEQ ID NO: 5737 - protein, 252 aa, Artificial Sequence; identical to SEQ ID NO: 5735
  source: /note="Description of Artificial Sequence: Synthetic single chain variable fragment"

SEQ ID NO: 5738 - protein, 252 aa, Artificial Sequence
  source: /note="Description of Artificial Sequence: Synthetic single chain variable fragment"
  MOD_RES (76)..(76): Any amino acid
  MOD_RES (201)..(201): Any amino acid
QVQLVESGGGLVQPGRSLRLSCAASGFTFDDYAMHWVRQAPGKGLEWVSGISWNSGRIGYADSVKGRFTISRDNAXNSLFLQMNSLRAEDTAVYYCARDQGYHYYDSAEHAFDIWGQGTVVTVSSGGGGSGGGGSGGGGSQSALTQPASVSGSPGQSITISCTETSSDLGGYNYVSWYQHRPGKAPKLIIYDVTVRPSGVXDRFSGSKSGNTASLTISGLQAEDEADYYCGSYTSSSTLLWVFGGGTKLTVL

SEQ ID NO: 5739 - protein, 252 aa, Artificial Sequence; identical to SEQ ID NO: 5733
  source: /note="Description of Artificial Sequence: Synthetic single chain variable fragment"

SEQ ID NO: 5740 - protein, 250 aa, Artificial Sequence
  source: /note="Description of Artificial Sequence: Synthetic single chain variable fragment"
QVQLVESGGGLVQPGRSLRLSCAASGFTFDDYAMHWVRQAPGKGLEWVSGISWNSGRIGYADSVKGRFTISRDNAKNSLFLQMNSLRAEDTAVYYCARDQGYHYYDSAEHAFDIWGQGTVVTVSSGGGGSGGGGSGGGGSQSALTQPASVSGSPGHSITISCTGTRSDVGGFDYVSWYQHNPGKAPKLIIYDVTKRPSGVSNRFSGAKSGITASLTISGLQAEDEADYYCTSYRPGPTFVFGTGTKLDIK

SEQ ID NO: 5741 - protein, 252 aa, Artificial Sequence
  source: /note="Description of Artificial Sequence: Synthetic single chain variable fragment"
QVQLVESGGGLVQPGRSLRLSCAASGFTFDDYAMHWVRQAPGKGLEWVSGISWNSGRIGYADSVKGRFTISRDNAKNSLFLQMNSLRAEDTAVYYCARDQGYHYYDSAEHAFDIWGQGTVVTVSSGGGGSGGGGSGGGGSQSALTQPASVSGSPGQSITISCTGTSSDLGGYNYVSWYQHRPGKAPKLIIYDVTVRPSGVSDRFSGSKSGNTASLTISGLQAEDEADYYCGSYTSSSTLLWVFGGGTKLDIK

SEQ ID NO: 5742 - protein, 236 aa, Artificial Sequence
  source: /note="Description of Artificial Sequence: Synthetic single chain variable fragment"
EVQLVESGGGLVQPGRSLRLSCAASGFTFDDYAMHWVRQAPGKGLEWVSGISWNSGRIGYADSVKGRFTISRDNAKNSLFLQMNSLRAEDTAVYYCARDQGYHYYDSAEHAFDIWGQGTMVTVSSQSVLTQPRSLSGSPGQSVTIACTGASTDVGGYNYVSWYQQHPGKAPKLMIYDVNKRPSGVPDRFSGSKSGNTAFLTISGLQAEDEADYYCCSYAGSYTFEVFGGGTKLTVL

SEQ ID NO: 5743 - protein, 251 aa, Artificial Sequence
  source: /note="Description of Artificial Sequence: Synthetic single chain variable fragment"
EVQLVESGGGLVQPGRSLRLSCAASGFTFDDYAMHWVRQAPGKGLEWVSGISWNSGRIGYADSVKGRFTISRDNAKNSLFLQMNSLRAEDTAVYYCARDQGYHYYDSAEHAFDIWGQGTMVTVSSGGGGSGGGGSGGGGSQLVLTQPPSVSGSPGQSVTFSCTGASSDVGGYDHVSWYQHHPGKGPKLLIYDVSKRPSGVPDRFSGSKSGNTASLTISGLQAEDEADYYCCSFAGYYTYWLFGGGTKVTVL

SEQ ID NO: 5744 - protein, 246 aa, Artificial Sequence
  source: /note="Description of Artificial Sequence: Synthetic single chain variable fragment"
EVQLVESGGGLVQPGRSLRLSCAASGFTFDDYAMHWVRQAPGKGLEWVSGISWNSGRIGYADSVKGRFTISRDNAKNSLFLQMNSLRAEDTAVYYCARDQGYHYYDSAEHAFDIWGQGTVVTVSSGGGGSGGGGSGGGGSQSALTQPRSVSGFPGQSVTISCTGTTSDDVSWYQQHPGKAPQLMLYDVSKRPSGVPHRFSGSRSGRAASLIISGLQTEDEADYFCCSYAGRYNSVPFGGGTKLTVL

SEQ ID NO: 5745 - protein, 239 aa, Artificial Sequence
  source: /note="Description of Artificial Sequence: Synthetic single chain variable fragment"
QVQLVESGGGLVQPGRSLRLSCAASGFTFDDYAMHWVRQAPGKGLEWVSGISWNSGRIGYADSVKGRFTISRDNAKNSLFLQMNSLRAEDTAVYYCARDQGYHYYDSAEHAFDIWGQGTMVTVSSGGGGSGGGGSGGGGSSYVLTQPPSASGTPGQRVTISCSGSSSNIGSNTVNWYQQFPGTAPKLLIYSNNQRPSGVPDRFSGSKSGTSASLAISGLQSEDEAEYYCAAWDDSLNVV

SEQ ID NO: 5746 - protein, 250 aa, Artificial Sequence
  source: /note="Description of Artificial Sequence: Synthetic single chain variable fragment"
EVQLVESGGGLVQPGRSLRLSCAASGFTFDDYAMHWVRQAPGKGLEWVSGISWNSGRIGYADSVKGRFTISRDNAKNSLFLQMNSLRAEDTAVYYCARDQGYHYYDSAEHAFDIWGQGTVVTVSSGGGGSGGGGSGGGGSQSVLTQPPSVSAAPGQKVTISCSGSSSNIGNNYVSWYQQLPGTAPKLLIYDNNKRPSGIPDRFSGSKSGTSATLGITGLQTGDEGDYYCGTWDISLRFGVFGGGTKVTVL

SEQ ID NO: 5747 - protein, 251 aa, Artificial Sequence
  source: /note="Description of Artificial Sequence: Synthetic single chain variable fragment"
EVQLVESGGGLVQPGRSLRLSCAASGFTFDDYAMHWVRLAPGKGLEWVSGISWNSGRIGYADSVKGRFTISRDNAKNSLFLQMNSLRAKDTAVYYCARDQGYHYYDSAEHAFDIWGQGTMVTVSSGGGGSGGGGSGGGGSQSVLTQPRSVSGSPGQSVTISCTGPISGVGDYTSVSWYQHYPGKTPKLIIYDVTQRPSGVPNRFSGSKSGNTASLTISGLQADDEADYYCCSYEAPTHTYVFGTGTKLTVL

SEQ ID NO: 5748 - protein, 242 aa, Artificial Sequence
  source: /note="Description of Artificial Sequence: Synthetic single chain variable fragment"
QVQLQESGPGLVKPSETLSLTCTVSGVSLPDYGVSWIRQPPGKGLEWIGVIWGSETTYYSSSLKSRVTISKDNSKNQVSLKLSSVTAADTAVYYCAKHYYYGGSYAMDYWGQGTLVTVSSGGGGSGGGGSGGGGSEIVMTQSPATLSLSPGERATLSCRASQDISKYLNWYQQKPGQAPRLLIYHTSRLHSGIPARFSGSGSGTDYTLTISSLQPEDFAVYFCQQGNTLPYTFGQGTKLEIK

SEQ ID NO: 5749 - protein, 242 aa, Artificial Sequence
  source: /note="Description of Artificial Sequence: Synthetic single chain variable fragment"
QVQLQESGPGLVKPSETLSLTCTVSGVSLPDYGVSWIRQPPGKGLEWIGVIWGSETTYYQSSLKSRVTISKDNSKNQVSLKLSSVTAADTAVYYCAKHYYYGGSYAMDYWGQGTLVTVSSGGGGSGGGGSGGGGSEIVMTQSPATLSLSPGERATLSCRASQDISKYLNWYQQKPGQAPRLLIYHTSRLHSGIPARFSGSGSGTDYTLTISSLQPEDFAVYFCQQGNTLPYTFGQGTKLEIK

SEQ ID NO: 5750 - protein, 246 aa, Artificial Sequence
  source: /note="Description of Artificial Sequence: Synthetic single chain variable fragment"
EVQLVESGGGLVQPGRSLRLSCAASGFTFDDYAMHWVRQAPGKGLEWVSGISWNSGRIGYADSVKGRFTISRDNAKNSLFLQMNSLRAEDTAVYYCARDQGYHYYDSAEHAFDIWGQGTVVTVSSGGGGSGGGGSGGGGSQSALTQPRSVSGFPGQSVTISCTGTTSDDVSWYQQHPGKAPQLMLYDVSKRPSGVPHRFSGSRSGRAASLIISGLQTEDEADYFCSSYAGRYNSVLFGGGTKLTVL

SEQ ID NO: 5751 - protein, 249 aa, Artificial Sequence
  source: /note="Description of Artificial Sequence: Synthetic single chain variable fragment"
EVQLVQSGGGLVQPGRSLRLSCAASGFTFDDYAMHWVRQAPGKGLEWVSGISWNSGSIGYADSVKGRFTISRDNAKNSLYLQMNSLRAEDTAVYYCARDQGYHYYDSAEHAFDIWGQGTVVTVSSGGGGSGGGGSGGGGSEIVLTQSPATLSLSPGETATLSCRASQSINHYLAWYQQKPGQAPRLLIYDASNRATGIPARFSGSGSGTDFTLTISSLEPEDFATYYCQQSYSHPRMYTFGQGTKLDIK

SEQ ID NO: 5752 - protein, 249 aa, Artificial Sequence
  source: /note="Description of Artificial Sequence: Synthetic single chain variable fragment"
QMQLVQSGGGLVQPGRSLRLSCAASGFTFDDYAMHWVRQAPGKGLEWVSGISWNSGSIGYADSVKGRFTISRDNAKNSLYLQMNSLRAEDTAVYYCARDQGYHYYDSAEHAFDIWGQGTVVTVSSGGGGSGGGGSGGGGSAIRMTQSPSSLSASVGDRVTVTCQASQDISNYLNWYQQKPGRAPKLLIYDASNVKAGVPSRFSGGGSGTDFTLTISSLQPEDFATYYCQQSYSTPQAYTFGQGTKLEIK

SEQ ID NO: 5753 - protein, 252 aa, Artificial Sequence; identical to SEQ ID NO: 5735
  source: /note="Description of Artificial Sequence: Synthetic single chain variable fragment"

SEQ ID NO: 5754 - protein, 495 aa, Artificial Sequence
  source: /note="Description of Artificial Sequence: Synthetic single chain variable fragment"
METDTLLLWVLLLWVPGSTGEVQLQQSGPELIKPGASVKMSCKASGYTFTSYVMHWVKQKPGQGLEWIGYINPYNDGTKYNEKFKGKATLTSDKSSSTAYMELSSLTSEDSAVYYCARGTYYYGSRVFDYWGQGTTLTVSSGGGGSGGGGSGGGGSDIVMTQAAPSIPVTPGESVSISCRSSKSLLNSNGNTYLYWFLQRPGQSPQLLIYRMSNLASGVPDRFSGSGSGTAFTLRISRVEAEDVGVYYCMQHLEYPFTFGAGTKLELKRSDPTTTPAPRPPTPAPTIASQPLSLRPEACRPAAGGAVHTRGLDFACDIYIWAPLAGTCGVLLLSLVITLYCKRGRKKLLYIFKQPFMRPVQTTQEEDGCSCRFPEEEEGGCELRVKFSRSADAPAYQQGQNQLYNELNLGRREEYDVLDKRRGRDPEMGGKPRRKNPQEGLYNELQKDKMAEAYSEIGMKGERRRGKGHDGLYQGLSTATKDTYDALHMQALPPR

SEQ ID NO: 5755 - protein, 247 aa, Artificial Sequence
  source: /note="Description of Artificial Sequence: Synthetic single chain variable fragment"
EIVMTQSPATLSLSPGERATLSCRASQDISKYLNWYQQKPGQAPRLLIYHTSRLHSGIPARFSGSGSGTDYTLTISSLQPEDFAVYFCQQGNTLPYTFGQGTKLEIKGGGGSGGGGSGGGGSGGGGSQVQLQESGPGLVKPSETLSLTCTVSGVSLPDYGVSWIRQPPGKGLEWIGVIWGSETTYYSSSLKSRVTISKDNSKNQVSLKLSSVTAADTAVYYCAKHYYYGGSYAMDYWGQGTLVTVSS

SEQ ID NO: 5756 - protein, 251 aa, Artificial Sequence
  source: /note="Description of Artificial Sequence: Synthetic single chain variable fragment"
QVQLVESGGGLVQPGRSLRLSCAASGFTFDDYAMHWVRQAPGKGLEWVSGISWNSGRIGYADSVKGRFTISRDNAKNSLFLQMNSLRAEDTAVYYCARDQGYHYYDSAEHAFDIWGQGTMVTVSSGGGGSGGGGSGGGGSQAVLTQPRSVSGSPGQSVTISCTGISSGVDSHRYVSWYQHHPGKAPKLMIYDFSKRPSGVPDRFSGSKSGNTASLTISGLQAEDEADYYCSSYAAISPNYVFGTGTKLTVL

SEQ ID NO: 5757 - protein, 250 aa, Artificial Sequence
  source: /note="Description of Artificial Sequence: Synthetic single chain variable fragment"
QVQLVESGGGLVQPGRSLRLSCAASGFTFDDYAMHWVRQAPGKGLEWVSGISWNSGRIGYADSVKGRFTISRDNAKNSLFLQMNSLRAEDTAVYYCARDQGYHYYDSAEHAFDIWGQGTVVTVSSGGGGSGGGGSGGGGSQSALTQPASVSGSPGHSITISCTGTRSDVGGFDYVSWYQHNPGKAPKLIIYDVTKRPSGVSNRFSGAKSGITASLTISGLQAEDEADYYCTSYRPGPTFVFGTGTKLTVL

SEQ ID NO: 5758 - protein, 247 aa, Artificial Sequence
  source: /note="Description of Artificial Sequence: Synthetic single chain variable fragment"
EVQLVQSGGGLVQPGRSLRLSCAASGFTFDDYAMHWVRQAPGKGLEWVSGISWNSGSIGYADSVKGRFTISRDNAKNSLYLQMNSLRAEDTAVYYCARDQGYHYYDSAEHAFDIWGQGTVVTVSSGGGGSGGGGSGGGGSDIQLTQSPSTLSASVGDRVTITCRASQSISRWLAWYQQKPGKAPKLLIYDASNLETGVPSRFSGSGSGTDFTFTISSLQPEDIATYYCQQYDNLPLTFGGGTKVEIK

SEQ ID NO: 5759 - protein, 248 aa, Artificial Sequence
  source: /note="Description of Artificial Sequence: Synthetic single chain variable fragment"
QMQLVQSGGGLVQPGRSLRLSCAASGFTFDDYAMHWVRQAPGKGLEWVSGISWNSGSIGYADSVKGRFTISRDNAKNSLYLQMNSLRAEDTAVYYCARDQGYHYYDSAEHAFDIWGQGTVVTVSSGGGGSGGGGSGGGGSAIRMTQSPSTLSASVGDRVTITCRASQSISHYLAWYQQKPGKAPKLLIFDASRLASGVPSRFSGSGSGTDFTLTISSLQPEDFATYYCQQSYGAPMFTFGPGTRVDLK

SEQ ID NO: 5760 - protein, 242 aa, Artificial Sequence
  source: /note="Description of Artificial Sequence: Synthetic single chain variable fragment"
DIQMTQTTSSLSASLGDRVTISCRASQDISKYLNWYQQKPDGTVKLLIYHTSRLHSGVPSRFSGSGSGTDYSLTISNLEQEDIATYFCQQGNTLPYTFGGGTKLEITGGGGSGGGGSGGGGSEVKLQESGPGLVAPSQSLSVTCTVSGVSLPDYGVSWIRQPPRKGLEWLGVIWGSETTYYNSALKSRLTIIKDNSKSQVFLKMNSLQTDDTAIYYCAKHYYYGGSYAMDYWGQGTSVTVSS

SEQ ID NO: 5761 - protein, 251 aa, Artificial Sequence
  source: /note="Description of Artificial Sequence: Synthetic single chain variable fragment"
EVQLVESGGGLVQPGRSLRLSCAASGFTFDDYAMHWVRQAPGKGLEWVSGISWNSGRIGYADSVKGRFTISRDNAKNSLFLQMNSLRAEDTAVYYCARDQGYHYYDSAEHAFDIWGQGTMVTVSSGGGGSGGGGSGGGGSQSALTQPASVSGSPGQSITISCTGTSSDVGAYNFVSWYQQLPGTAPKFLIYDNNKRPPGIPDRFSGSKSGTSATLGITGLQTGDEADYYCATWDSGLSAVVFGGGTKLTVL

SEQ ID NO: 5762 - protein, 247 aa, Artificial Sequence
  source: /note="Description of Artificial Sequence: Synthetic single chain variable fragment"
EIVMTQSPATLSLSPGERATLSCRASQDISKYLNWYQQKPGQAPRLLIYHTSRLHSGIPARFSGSGSGTDYTLTISSLQPEDFAVYFCQQGNTLPYTFGQGTKLEIKGGGGSGGGGSGGGGSGGGGSQVQLQESGPGLVKPSETLSLTCTVSGVSLPDYGVSWIRQPPGKGLEWIGVIWGSETTYYQSSLKSRVTISKDNSKNQVSLKLSSVTAADTAVYYCAKHYYYGGSYAMDYWGQGTLVTVSS

SEQ ID NO: 5763 - protein, 250 aa, Artificial Sequence
  source: /note="Description of Artificial Sequence: Synthetic single chain variable fragment"
EVQLVESGGGLVQPGRSLRLSCAASGFTFDDYAMHWVRQAPGKGLEWVSGISWNSGRIGYADSVKGRFTISRDNAKNSLFLQMNSLRAEDTAVYYCARDQGYHYYDSAEHAFDIWGQGTMVTVSSGGGGSGGGGSGGGGSQSALTQPASVSGSPGQSITIFCTGTSSDVGGYNYVSWYQQLPGTAPKLLIYSNNQRPSGVPDRFSGSKSGTSASLAISGLRSEDEADYYCAAWDDSLSVVFGGGTKLTVL

SEQ ID NO: 5764 - protein, 252 aa, Artificial Sequence
  source: /note="Description of Artificial Sequence: Synthetic single chain variable fragment"
EVQLQQSGPELIKPGASVKMSCKASGYTFTSYVMHWVKQKPGQGLEWIGYINPYNDGTKYNEKFKGKATLTSDKSSSTAYMELSSLTSEDSAVYYCARGTYYYGSRVFDYWGQGTTLTVSSGGGGSGGGGSGGGGSDIVMTQAAPSIPVTPGESVSISCRSSKSLLNSNGNTYLYWFLQRPGQSPQLLIYRMSNLASGVPDRFSGSGSGTAFTLRISRVEAEDVGVYYCMQHLEYPFTFGAGTKLELKRSDP

SEQ ID NO: 5765 - protein, 247 aa, Artificial Sequence
  source: /note="Description of Artificial Sequence: Synthetic single chain variable fragment"
QVQLQESGPGLVKPSETLSLTCTVSGVSLPDYGVSWIRQPPGKGLEWIGVIWGSETTYYSSSLKSRVTISKDNSKNQVSLKLSSVTAADTAVYYCAKHYYYGGSYAMDYWGQGTLVTVSSGGGGSGGGGSGGGGSGGGGSEIVMTQSPATLSLSPGERATLSCRASQDISKYLNWYQQKPGQAPRLLIYHTSRLHSGIPARFSGSGSGTDYTLTISSLQPEDFAVYFCQQGNTLPYTFGQGTKLEIK

SEQ ID NO: 5766 - protein, 247 aa, Artificial Sequence
  source: /note="Description of Artificial Sequence: Synthetic single chain variable fragment"
QVQLQESGPGLVKPSETLSLTCTVSGVSLPDYGVSWIRQPPGKGLEWIGVIWGSETTYYQSSLKSRVTISKDNSKNQVSLKLSSVTAADTAVYYCAKHYYYGGSYAMDYWGQGTLVTVSSGGGGSGGGGSGGGGSGGGGSEIVMTQSPATLSLSPGERATLSCRASQDISKYLNWYQQKPGQAPRLLIYHTSRLHSGIPARFSGSGSGTDYTLTISSLQPEDFAVYFCQQGNTLPYTFGQGTKLEIK

SEQ ID NO: 5767 - protein, 249 aa, Artificial Sequence
  source: /note="Description of Artificial Sequence: Synthetic single chain variable fragment"
EVQLVESGGGLVQPGRSLRLSCAASGFTFDDYAMHWVRQAPGKGLEWVSGISWNSGRIGYADSVKGRFTISRDNAKNSLFLQMNSLRAEDTAVYYCARDQGYHYYDSAEHAFDIWGQGTVVTVSSGGGGSGGGGSGGGGSQSVLTQPPSVSAAPGQEVTISCSGSSSNIGNNYVSWYQQLPGTAPKLLIYDNDKRPSGIPDRFSGSKSGTSATLGITGLQTGDEADYYCGTWDGNLSAVFGGGTKVTVL

SEQ ID NO: 5768 - protein, 251 aa, Artificial Sequence
  source: /note="Description of Artificial Sequence: Synthetic single chain variable fragment"
EVQLVESGGGLVQPGRSLRLSCAASGFTFDDYAMHWVRQAPGKGLEWVSGISWNSGRIGYADSVKGRFTISRDNAKNSLFLQMNSLRAEDTAVYYCARDQGYHYYDSAEHAFDIWGQGTMVTVSSGGGGSGGGGSGGGGSQAVLTQPRSVSGSPGQSVTISCTGISSGVDSHRYVSWYQHHPGKAPKLMIYDFSKRPSGVPDRFSGSKSGNTASLTISGLQAEDEADYYCCSYAAISPNYVFGTGTKLTVL

SEQ ID NO: 5769 - protein, 247 aa, Artificial Sequence
  source: /note="Description of Artificial Sequence: Synthetic single chain variable fragment"
EIVMTQSPATLSLSPGERATLSCRASQDISKYLNWYQQKPGQAPRLLIYHTSRLHSGIPARFSGSGSGTDYTLTISSLQPEDFAVYFCQQGNTLPYTFGQGTKLEIKGGGGSGGGGSGGGGSGGGGSQVQLQESGPGLVKPSETLSLTCTVSGVSLPDYGVSWIRQPPGKGLEWIGVIWGSETTYYNSSLKSRVTISKDNSKNQVSLKLSSVTAADTAVYYCAKHYYYGGSYAMDYWGQGTLVTVSS

SEQ ID NO: 5770 - protein, 241 aa, Artificial Sequence
  source: /note="Description of Artificial Sequence: Synthetic single chain variable fragment"
QVQLQQSGPELVKPGASVKISCKASGYAFSSSWMNWVKQRPGKGLEWIGRIYPGDEDTNYSGKFKDKATLTADKSSTTAYMQLSSLTSEDSAVYFCARSLLYGDYLDYWGQGTTLTVSSGGGGSGGGGSGGGGSQIVLTQSPAIMSASPGEKVTMTCSASSSVSYMHWYQQKSGTSPKRWIYDTSKLASGVPDRFSGSGSGTSYFLTINNMEAEDAATYYCQQWNINPLTFGAGTKLELKR

SEQ ID NO: 5771 - protein, 248 aa, Artificial Sequence; identical to SEQ ID NO: 5724
  source: /note="Description of Artificial Sequence: Synthetic single chain variable fragment"

SEQ ID NO: 5772 - protein, 246 aa, Artificial Sequence; identical to SEQ ID NO: 5728
  source: /note="Description of Artificial Sequence: Synthetic single chain variable fragment"

SEQ ID NO: 5773 - protein, 252 aa, Artificial Sequence; identical to SEQ ID NO: 5729
  source: /note="Description of Artificial Sequence: Synthetic single chain variable fragment"

SEQ ID NO: 5774 - protein, 249 aa, Artificial Sequence; identical to SEQ ID NO: 5730
  source: /note="Description of Artificial Sequence: Synthetic single chain variable fragment"

SEQ ID NO: 5775 - protein, 249 aa, Artificial Sequence; identical to SEQ ID NO: 5731
  source: /note="Description of Artificial Sequence: Synthetic single chain variable fragment"

SEQ ID NO: 5776 - protein, 251 aa, Artificial Sequence; identical to SEQ ID NO: 5732
  source: /note="Description of Artificial Sequence: Synthetic single chain variable fragment"

SEQ ID NO: 5777 - protein, 252 aa, Artificial Sequence; identical to SEQ ID NO: 5733
  source: /note="Description of Artificial Sequence: Synthetic single chain variable fragment"

SEQ ID NO: 5778 - protein, 252 aa, Artificial Sequence; identical to SEQ ID NO: 5733
  source: /note="Description of Artificial Sequence: Synthetic single chain variable fragment"

SEQ ID NO: 5779 - protein, 249 aa, Artificial Sequence
  source: /note="Description of Artificial Sequence: Synthetic single chain variable fragment"
  MOD_RES (64)..(65): Any amino acid
  MOD_RES (68)..(69): Any amino acid
  MOD_RES (93)..(93): Any amino acid
  MOD_RES (98)..(98): Any amino acid
  MOD_RES (102)..(102): Any amino acid
  MOD_RES (104)..(104): Any amino acid
  MOD_RES (113)..(113): Any amino acid
  MOD_RES (145)..(146): Any amino acid
  MOD_RES (148)..(149): Any amino acid
  MOD_RES (233)..(233): Any amino acid
  MOD_RES (244)..(244): Any amino acid
QVQLVESGGGLVQPGRSLRLSCAASGFTFDDYAMHWVRQAPGKGLEWVSGISWNSGRIGYADSXXGRXXISRDNAKNSLFLQMNSLRAEDTAXYYCAXDQGXHXYDSAEHAFXIWGQGTVVTVSSGGGGSGGGGSGGGGSQSVLXXPXXASGSPGQSVTVSCTGTGRDIGAYDYVSWYQQHPGKAPKLLIYGVNKRPSGVPDRFSGSKSDNTASLTVSGLQVEDEADYYCSSXAGRKYVFGTGXKVTVL

SEQ ID NO: 5780 - protein, 252 aa, Artificial Sequence; identical to SEQ ID NO: 5735
  source: /note="Description of Artificial Sequence: Synthetic single chain variable fragment"

SEQ ID NO: 5781 - protein, 252 aa, Artificial Sequence; identical to SEQ ID NO: 5735
  source: /note="Description of Artificial Sequence: Synthetic single chain variable fragment"

SEQ ID NO: 5782 - protein, 252 aa, Artificial Sequence; identical to SEQ ID NO: 5735
  source: /note="Description of Artificial Sequence: Synthetic single chain variable fragment"

SEQ ID NO: 5783 - protein, 252 aa, Artificial Sequence; identical to SEQ ID NO: 5738
  source: /note="Description of Artificial Sequence: Synthetic single chain variable fragment"
  MOD_RES (76)..(76): Any amino acid
  MOD_RES (201)..(201): Any amino acid

SEQ ID NO: 5784 - protein, 252 aa, Artificial Sequence; identical to SEQ ID NO: 5733
  source: /note="Description of Artificial Sequence: Synthetic single chain variable fragment"

SEQ ID NO: 5785 - protein, 250 aa, Artificial Sequence; identical to SEQ ID NO: 5740
  source: /note="Description of Artificial Sequence: Synthetic single chain variable fragment"

SEQ ID NO: 5786 - protein, 252 aa, Artificial Sequence; identical to SEQ ID NO: 5741
  source: /note="Description of Artificial Sequence: Synthetic single chain variable fragment"

SEQ ID NO: 5787 - protein, 236 aa, Artificial Sequence; identical to SEQ ID NO: 5742
  source: /note="Description of Artificial Sequence: Synthetic single chain variable fragment"

SEQ ID NO: 5788 - protein, 251 aa, Artificial Sequence; identical to SEQ ID NO: 5743
  source: /note="Description of Artificial Sequence: Synthetic single chain variable fragment"

SEQ ID NO: 5789 - protein, 246 aa, Artificial Sequence; identical to SEQ ID NO: 5744
  source: /note="Description of Artificial Sequence: Synthetic single chain variable fragment"

SEQ ID NO: 5790 - protein, 239 aa, Artificial Sequence; identical to SEQ ID NO: 5745
  source: /note="Description of Artificial Sequence: Synthetic single chain variable fragment"

SEQ ID NO: 5791 - protein, 250 aa, Artificial Sequence; identical to SEQ ID NO: 5746
  source: /note="Description of Artificial Sequence: Synthetic single chain variable fragment"

SEQ ID NO: 5792 - protein, 251 aa, Artificial Sequence; identical to SEQ ID NO: 5747
  source: /note="Description of Artificial Sequence: Synthetic single chain variable fragment"

SEQ ID NO: 5793 - protein, 273 aa, Artificial Sequence
  source: /note="Description of Artificial Sequence: Synthetic single chain variable fragment"
MALPVTALLLPLALLLHAARPEVQLQQSGPELIKPGASVKMSCKASGYTFTSYVMHWVKQKPGQGLEWIGYINPYNDGTKYNEKFKGKATLTSDKSSSTAYMELSSLTSEDSAVYYCARGTYYYGSRVFDYWGQGTTLTVSSGGGGSGGGGSGGGGSDIVMTQAAPSIPVTPGESVSISCRSSKSLLNSNGNTYLYWFLQRPGQSPQLLIYRMSNLASGVPDRFSGSGSGTAFTLRISRVEAEDVGVYYCMQHLEYPFTFGAGTKLELKRSDP

SEQ ID NO: 5794 - protein, 270 aa, Artificial Sequence
  source: /note="Description of Artificial Sequence: Synthetic single chain variable fragment"
MALPVTALLLPLALLLHAARPEVKLQESGPGLVAPSQSLSVTCTVSGVSLPDYGVSWIRQPPRKGLEWLGVIWGSETTYYNSALKSRLTIIKDNSKSQVFLKMNSLQTDDTAIYYCAKHYYYGGSYAMDYWGQGTSVTVSSGGGGSGGGGSGGGGSDIQMTQTTSSLSASLGDRVTISCRASQDISKYLNWYQQKPDGTVKLLIYHTSRLHSGVPSRFSGSGSGTDYSLTISNLEQEDIATYFCQQGNTLPYTFGGGTKLEITRSDPTSS

SEQ ID NO: 5795 - protein, 277 aa, Artificial Sequence
  source: /note="Description of Artificial Sequence: Synthetic single chain variable fragment"
MAPAMESPTLLCVALLFFAPDGVLAEVQLQQSGPELIKPGASVKMSCKASGYTFTSYVMHWVKQKPGQGLEWIGYINPYNDGTKYNEKFKGKATLTSDKSSSTAYMELSSLTSEDSAVYYCARGTYYYGSRVFDYWGQGTTLTVSSGGGGSGGGGSGGGGSDIVMTQAAPSIPVTPGESVSISCRSSKSLLNSNGNTYLYWFLQRPGQSPQLLIYRMSNLASGVPDRFSGSGSGTAFTLRISRVEAEDVGVYYCMQHLEYPFTFGAGTKLELKRSDP

SEQ ID NO: 5796 - protein, 246 aa, Artificial Sequence; identical to SEQ ID NO: 5750
  source: /note="Description of Artificial Sequence: Synthetic single chain variable fragment"

SEQ ID NO: 5797 - protein, 249 aa, Artificial Sequence; identical to SEQ ID NO: 5751
  source: /note="Description of Artificial Sequence: Synthetic single chain variable fragment"

SEQ ID NO: 5798 - protein, 249 aa, Artificial Sequence; identical to SEQ ID NO: 5752
  source: /note="Description of Artificial Sequence: Synthetic single chain variable fragment"

SEQ ID NO: 5799 - protein, 252 aa, Artificial Sequence; identical to SEQ ID NO: 5735
  source: /note="Description of Artificial Sequence: Synthetic single chain variable fragment"

SEQ ID NO: 5800 - protein, 251 aa, Artificial Sequence; identical to SEQ ID NO: 5756
  source: /note="Description of Artificial Sequence: Synthetic single chain variable fragment"

SEQ ID NO: 5801 - protein, 250 aa, Artificial Sequence; identical to SEQ ID NO: 5757
  source: /note="Description of Artificial Sequence: Synthetic single chain variable fragment"

SEQ ID NO: 5802 - protein, 247 aa, Artificial Sequence; identical to SEQ ID NO: 5758
  source: /note="Description of Artificial Sequence: Synthetic single chain variable fragment"

SEQ ID NO: 5803 - protein, 248 aa, Artificial Sequence; identical to SEQ ID NO: 5759
  source: /note="Description of Artificial Sequence: Synthetic single chain variable fragment"

SEQ ID NO: 5804 - protein, 251 aa, Artificial Sequence; identical to SEQ ID NO: 5761
  source: /note="Description of Artificial Sequence: Synthetic single chain variable fragment"

SEQ ID NO: 5805 - protein, 250 aa, Artificial Sequence; identical to SEQ ID NO: 5763
  source: /note="Description of Artificial Sequence: Synthetic single chain variable fragment"

SEQ ID NO: 5806 - protein, 249 aa, Artificial Sequence; identical to SEQ ID NO: 5767
  source: /note="Description of Artificial Sequence: Synthetic single chain variable fragment"

SEQ ID NO: 5807 - protein, 251 aa, Artificial Sequence; identical to SEQ ID NO: 5768
  source: /note="Description of Artificial Sequence: Synthetic single chain variable fragment"

SEQ ID NO: 5808 - protein, 249 aa, Artificial Sequence; identical to SEQ ID NO: 5731
  source: /note="Description of Artificial Sequence: Synthetic single chain variable fragment"

SEQ ID NO: 5809 - protein, 242 aa, Artificial Sequence; identical to SEQ ID NO: 5722
  source: /note="Description of Artificial Sequence: Synthetic single chain variable fragment"

SEQ ID NO: 5810 - protein, 245 aa, Artificial Sequence
  source: /note="Description of Artificial Sequence: Synthetic single chain variable fragment"
DIQMTQTTSSLSASLGDRVTISCRASQDISKYLNWYQQKPDGTVKLLIYHTSRLHSGVPSRFSGSGSGTDYSLTISNLEQEDIATYFCQQGNTLPYTFGGGTKLEITGSTSGSGKPGSGEGSTKGEVKLQESGPGLVAPSQSLSVTCTVSGVSLPDYGVSWIRQPPRKGLEWLGVIWGSETTYYNSALKSRLTIIKDNSKSQVFLKMNSLQTDDTAIYYCAKHYYYGGSYAMDYWGQGTSVTVSS

SEQ ID NO: 5811 - protein, 119 aa, Artificial Sequence
  source: /note="Description of Artificial Sequence: Synthetic single chain variable fragment"
QVQLLESGAELVRPGSSVKISCKASGYAFSSYWMNWVKQRPGQGLEWIGQIYPGDGDTNYNGKFKGQATLTADKSSSTAYMQLSGLTSEDSAVYSCARKTISSVVDFYFDYWGQGTTVT

SEQ ID NO: 5812 - protein, 438 aa, Artificial Sequence
  source: /note="Description of Artificial Sequence: Synthetic single chain variable fragment"
DIQMTQTTSSLSASLGDRVTISCRASQDISKYLNWYQQKPDGTVKLLIYHTSRLHSGVPSRFSGSGSGTDYSLTISNLEQEDIATYFCQQGNTLPYVKLQESGPGLVAPSQSLSVTCTVSGVSLPDYGVSWIRQPPRKGLEWLGVIWGSETTYYNSALKSRLTIIKDNSKSQVFLKMNSLQTDDTAIYYCAKHYYYGGSYAMDYWGQGTSVTVSSTTTPAPRPPTPAPTIASQPLSLRPEACRPAAGGAVHTRGLDFACDIYIWAPLAGTCGVLLLSLVITLYCKRGRKKLLYIFKQPFMRPVQTTQEEDGCSCRFPEEEEGGCELRVKFSRSADAPAYKQGQNQLYNELNLGRREEYDVLDKRRGRDPEMGGKPRRKNPQEGLYNELQKDKMAEAYSEIGMKGERRRGKGHDGLYQGLSTATKDTYDALHMQALPPR

SEQ ID NO: 5813 - protein, 272 aa, Artificial Sequence
  source: /note="Description of Artificial Sequence: Synthetic single chain variable fragment"
MALPVTALLLPLALLLHAARPEVQLQQSGPELIKPGASVKMSCKASGYTFTSYVMHWVKQKPGQGLEWIGYINPYNDGTKYNEKFKGKATLTSDKSSSTAYMELSSLTSEDSAVYYCARGTYYYGSRVFDYWGQGTTLTVSSGGGGSGGGGSGGGGSDIVMTQAAPSIPVTPGESVSISCRSSKSLLNSNGNTYLYWFLQRPGQSPQLLIYRMSNLASGVPDRFSGSGSGTAFTLRISRVEAEDVGVYYCMQHLEYPFTFGAGTKLELKRSD

SEQ ID NO: 5814 - protein, 267 aa, Artificial Sequence
  source: /note="Description of Artificial Sequence: Synthetic single chain variable fragment"
MALPVTALLLPLALLLHAARPEVQLQQSGPDLVKPGASVKISCKASGYSFTGYYMHWVKQSHGKSLEWIGRINPNNGVTLYNQKFKDKAILTVDKSSTTAYMELRSLTSEDSAVYYCARSTMITNYVMDYWGQVTSVTVSSGGGGSGGGGSGGGGSSIVMTQTPTFLLVSAGDRVTITCKASQSVSNDVAWYQQKPGQSPTLLISYTSSRYAGVPDRFIGSGYGTDFTFTISTLQAEDLAVYFCQQDYNSPPTFGGGTKLEIKRSDP

SEQ ID NO: 5815 - protein, 270 aa, Artificial Sequence; identical to SEQ ID NO: 5794
  source: /note="Description of Artificial Sequence: Synthetic single chain variable fragment"

SEQ ID NO: 5816 - protein, 277 aa, Artificial Sequence; identical to SEQ ID NO: 5795
  source: /note="Description of Artificial Sequence: Synthetic single chain variable fragment"

SEQ ID NO: 5817 - protein, 242 aa, Artificial Sequence; identical to SEQ ID NO: 5727
  source: /note="Description of Artificial Sequence: Synthetic single chain variable fragment"

SEQ ID NO: 5818 - protein, 242 aa, Artificial Sequence; identical to SEQ ID NO: 5748
  source: /note="Description of Artificial Sequence: Synthetic single chain variable fragment"

SEQ ID NO: 5819 - protein, 242 aa, Artificial Sequence; identical to SEQ ID NO: 5749
  source: /note="Description of Artificial Sequence: Synthetic single chain variable fragment"

SEQ ID NO: 5820 - protein, 247 aa, Artificial Sequence; identical to SEQ ID NO: 5755
  source: /note="Description of Artificial Sequence: Synthetic single chain variable fragment"

SEQ ID NO: 5821 - protein, 247 aa, Artificial Sequence; identical to SEQ ID NO: 5762
  source: /note="Description of Artificial Sequence: Synthetic single chain variable fragment"

SEQ ID NO: 5822 - protein, 247 aa, Artificial Sequence; identical to SEQ ID NO: 5765
  source: /note="Description of Artificial Sequence: Synthetic single chain variable fragment"

SEQ ID NO: 5823 - protein, 247 aa, Artificial Sequence; identical to SEQ ID NO: 5766
  source: /note="Description of Artificial Sequence: Synthetic single chain variable fragment"

SEQ ID NO: 5824 - protein, 247 aa, Artificial Sequence; identical to SEQ ID NO: 5769
  source: /note="Description of Artificial Sequence: Synthetic single chain variable fragment"

SEQ ID NO: 5825 - protein, 247 aa, Artificial Sequence; identical to SEQ ID NO: 5723
  source: /note="Description of Artificial Sequence: Synthetic single chain variable fragment"

SEQ ID NO: 5826 - protein, 242 aa, Artificial Sequence; identical to SEQ ID NO: 5725
  source: /note="Description of Artificial Sequence: Synthetic single chain variable fragment"

SEQ ID NO: 5827 - protein, 495 aa, Artificial Sequence; identical to SEQ ID NO: 5754
  source: /note="Description of Artificial Sequence: Synthetic single chain variable fragment"

SEQ ID NO: 5828 - protein, 242 aa, Artificial Sequence; identical to SEQ ID NO: 5726
  source: /note="Description of Artificial Sequence: Synthetic single chain variable fragment"

SEQ ID NO: 5829 - protein, 242 aa, Artificial Sequence; identical to SEQ ID NO: 5760
  source: /note="Description of Artificial Sequence: Synthetic single chain variable fragment"

SEQ ID NO: 5830 - protein, 252 aa, Artificial Sequence; identical to SEQ ID NO: 5764
  source: /note="Description of Artificial Sequence: Synthetic single chain variable fragment"

SEQ ID NO: 5831 - protein, 250 aa, Artificial Sequence
  source: /note="Description of Artificial Sequence: Synthetic single chain variable fragment"
DIQMTQTTSSLSASLGDRVTISCRASQDISKYLNWYQQKPDGTVKLLIYHTSRLHSGVPSRFSGSGSGTDYSLTISNLEQEDIATYFCQQGNTLPYTFGGGTKLEITKAGGGGSGGGGSGGGGSGGGGSEVKLQESGPGLVAPSQSLSVTCTVSGVSLPDYGVSWIRQPPRKGLEWLGVIWGSETTYYNSALKSRLTIIKDNSKSQVFLKMNSLQTDDTAIYYCAKHYYYGGSYAMDYWGQGTSVTVSSD

SEQ ID NO: 5832 - protein, 242 aa, Artificial Sequence; identical to SEQ ID NO: 5760
  source: /note="Description of Artificial Sequence: Synthetic single chain variable fragment"

SEQ ID NO: 5833 - protein, 251 aa, Artificial Sequence
  source: /note="Description of Artificial Sequence: Synthetic single chain variable fragment"
EVQLQQSGPELIKPGASVKMSCKASGYTFTSYVMHWVKQKPGQGLEWIGYINPYNDGTKYNEKFKGKATLTSDKSSSTAYMELSSLTSEDSAVYYCARGTYYYGSRVFDYWGQGTTLTVSSGGGGSGGGGSGGGGSDIVMTQAAPSIPVTPGESVSISCRSSKSLLNSNGNTYLYWFLQRPGQSPQLLIYRMSNLASGVPDRFSGSGSGTAFTLRISRVEAEDVGVYYCMQHLEYPFTFGAGTKLELKRAD

SEQ ID NO: 5834 - protein, 271 aa, Artificial Sequence
  source: /note="Description of Artificial Sequence: Synthetic single chain variable fragment"
MALPVTALLLPLALLLHAARPEIVMTQSPATLSLSPGERATLSCRASQDISKYLNWYQQKPGQAPRLLIYHTSRLHSGIPARFSGSGSGTDYTLTISSLQPEDFAVYFCQQGNTLPYTFGQGTKLEIKGGGGSGGGGSGGGGSQVQLQESGPGLVKPSETLSLTCTVSGVSLPDYGVSWIRQPPGKGLEWIGVIWGSETTYYSSSLKSRVTISKDNSKNQVSLKLSSVTAADTAVYYCAKHYYYGGSYAMDYWGQGTLVTVSSHHHHHHHH

SEQ ID NO: 5835 - protein, 248 aa, Artificial Sequence; identical to SEQ ID NO: 5724
  source: /note="Description of Artificial Sequence: Synthetic single chain variable fragment"

SEQ ID NO: 5836 - protein, 246 aa, Artificial Sequence; identical to SEQ ID NO: 5728
  source: /note="Description of Artificial Sequence: Synthetic single chain variable fragment"

SEQ ID NO: 5837 - protein, 252 aa, Artificial Sequence; identical to SEQ ID NO: 5729
  source: /note="Description of Artificial Sequence: Synthetic single chain variable fragment"

SEQ ID NO: 5838 - protein, 249 aa, Artificial Sequence; identical to SEQ ID NO: 5730
  source: /note="Description of Artificial Sequence: Synthetic single chain variable fragment"

SEQ ID NO: 5839 - protein, 251 aa, Artificial Sequence; identical to SEQ ID NO: 5732
  source: /note="Description of Artificial Sequence: Synthetic single chain variable fragment"

SEQ ID NO: 5840 - protein, 252 aa, Artificial Sequence; identical to SEQ ID NO: 5733
  source: /note="Description of Artificial Sequence: Synthetic single chain variable fragment"

SEQ ID NO: 5841 - protein, 249 aa, Artificial Sequence; identical to SEQ ID NO: 5779
  source: /note="Description of Artificial Sequence: Synthetic single chain variable fragment"
  MOD_RES (64)..(65): Any amino acid
  MOD_RES (68)..(69): Any amino acid
  MOD_RES (93)..(93): Any amino acid
  MOD_RES (98)..(98): Any amino acid
  MOD_RES (102)..(102): Any amino acid
  MOD_RES (104)..(104): Any amino acid
  MOD_RES (113)..(113): Any amino acid
  MOD_RES (145)..(146): Any amino acid
  MOD_RES (148)..(149): Any amino acid
  MOD_RES (233)..(233): Any amino acid
  MOD_RES (244)..(244): Any amino acid

SEQ ID NO: 5842 - protein, 252 aa, Artificial Sequence; identical to SEQ ID NO: 5738
  source: /note="Description of Artificial Sequence: Synthetic single chain variable fragment"
  MOD_RES (76)..(76): Any amino acid
  MOD_RES (201)..(201): Any amino acid

SEQ ID NO: 5843 - protein, 250 aa, Artificial Sequence; identical to SEQ ID NO: 5740
  source: /note="Description of Artificial Sequence: Synthetic single chain variable fragment"

SEQ ID NO: 5844 - protein, 252 aa, Artificial Sequence; identical to SEQ ID NO: 5741
  source: /note="Description of Artificial Sequence: Synthetic single chain variable fragment"

SEQ ID NO: 5845 - protein, 236 aa, Artificial Sequence; identical to SEQ ID NO: 5742
  source: /note="Description of Artificial Sequence: Synthetic single chain variable fragment"

SEQ ID NO: 5846 - protein, 251 aa, Artificial Sequence; identical to SEQ ID NO: 5743
  source: /note="Description of Artificial Sequence: Synthetic single chain variable fragment"

SEQ ID NO: 5847 - protein, 246 aa, Artificial Sequence; identical to SEQ ID NO: 5744
  source: /note="Description of Artificial Sequence: Synthetic single chain variable fragment"

SEQ ID NO: 5848 - protein, 239 aa, Artificial Sequence; identical to SEQ ID NO: 5745
  source: /note="Description of Artificial Sequence: Synthetic single chain variable fragment"

SEQ ID NO: 5849 - protein, 250 aa, Artificial Sequence; identical to SEQ ID NO: 5746
  source: /note="Description of Artificial Sequence: Synthetic single chain variable fragment"

SEQ ID NO: 5850 - protein, 251 aa, Artificial Sequence; identical to SEQ ID NO: 5747
  source: /note="Description of Artificial Sequence: Synthetic single chain variable fragment"

SEQ ID NO: 5851 - protein, 246 aa, Artificial Sequence; identical to SEQ ID NO: 5750
  source: /note="Description of Artificial Sequence: Synthetic single chain variable fragment"

SEQ ID NO: 5852 - protein, 249 aa, Artificial Sequence; identical to SEQ ID NO: 5751
  source: /note="Description of Artificial Sequence: Synthetic single chain variable fragment"

SEQ ID NO: 5853 - protein, 249 aa, Artificial Sequence; identical to SEQ ID NO: 5752
  source: /note="Description of Artificial Sequence: Synthetic single chain variable fragment"

SEQ ID NO: 5854 - protein, 252 aa, Artificial Sequence; identical to SEQ ID NO: 5735
  source: /note="Description of Artificial Sequence: Synthetic single chain variable fragment"

SEQ ID NO: 5855 - protein, 251 aa, Artificial Sequence; identical to SEQ ID NO: 5756
  source: /note="Description of Artificial Sequence: Synthetic single chain variable fragment"

SEQ ID NO: 5856 - protein, 250 aa, Artificial Sequence; identical to SEQ ID NO: 5757
  source: /note="Description of Artificial Sequence: Synthetic single chain variable fragment"

SEQ ID NO: 5857 - protein, 247 aa, Artificial Sequence; identical to SEQ ID NO: 5758
  source: /note="Description of Artificial Sequence: Synthetic single chain variable fragment"

SEQ ID NO: 5858 - protein, 248 aa, Artificial Sequence; identical to SEQ ID NO: 5759
  source: /note="Description of Artificial Sequence: Synthetic single chain variable fragment"

SEQ ID NO: 5859 - protein, 251 aa, Artificial Sequence; identical to SEQ ID NO: 5761
  source: /note="Description of Artificial Sequence: Synthetic single chain variable fragment"

SEQ ID NO: 5860 - protein, 250 aa, Artificial Sequence; identical to SEQ ID NO: 5763
  source: /note="Description of Artificial Sequence: Synthetic single chain variable fragment"

SEQ ID NO: 5861 - protein, 249 aa, Artificial Sequence; identical to SEQ ID NO: 5767
  source: /note="Description of Artificial Sequence: Synthetic single chain variable fragment"

SEQ ID NO: 5862 - protein, 251 aa, Artificial Sequence; identical to SEQ ID NO: 5768
  source: /note="Description of Artificial Sequence: Synthetic single chain variable fragment"

SEQ ID NO: 5863 - protein, 249 aa, Artificial Sequence; identical to SEQ ID NO: 5731
  source: /note="Description of Artificial Sequence: Synthetic single chain variable fragment"

SEQ ID NO: 5864 - protein, 277 aa, Artificial Sequence
  source: /note="Description of Artificial Sequence: Synthetic single chain variable fragment"
MAPAMESPTLLCVALLFFAPDGVLAEVQLQQSGPELIKPGASVKMSCKASGYTFTSYVMHWVKQKPGQGLEWIGYINPYNDGTKYNEKFKGKATLTSDKSSSTAYMELSSLTSEDSAVYYCARGTYYVGSRVFDYWGQGTTLTVSSGGGGSGGGGSGGGGSDIVMTQAAPSIPVTPGESVSISCRSSKSLLNSNGNTYLYWFLQRPGQSPQLLIYRMSNLASGVPDRFSGSGSGTAFTLRISRVEAEDVGVYVCMQHLEYPFTFGAGTKLELKRSDP

SEQ ID NO: 5865 - protein, 514 aa, Artificial Sequence
  source: /note="Description of Artificial Sequence: Synthetic single chain variable fragment"
EVQLQQSGPGLVKPSQTLSLTCAISGDSVSSNSAAWNWIRQSPSRGLEWLGRTYYRSKWYNDYAVSVKSRITINPDTSKNQFSLQLNSVTPEDTAVYYCARDLGWIAVAGTFDYWGQGTLVTVSSGGGGSGGGGSGGGGSQSALTQPASVSGSPGQSITISCTGTSSDVGGYNYVSWYQQHPGKAPKLMIYDVSKRPSGVSNRFSGSKSGNTASLTISGLQAEDEADYYCSSYTSSSLNHVFGTGTKVTVLTGGGGSGGGGSGGGGSGGGGSEIVMTQSPATLSLSPGERATLSCRASQDISKYLNWYQQKPGQAPRLLIYHTSRLHSGIPARFSGSGSGTDYTLTISSLQPEDFAVYFCQQGNTLPYTFGQGTKLEIKGGGGSGGGGSGGGGSQVQLQESGPGLVKPSETLSLTCTVSGVSLPDYGVSWIRQPPGKGLEWIGVIWGSETTYYQSSLKSRVTISKDNSKNQVSLKLSSVTAADTAVYYCAKHYYYGGSYAMDYWGQGTLVTVSS

SEQ ID NO: 5866 - protein, 514 aa, Artificial Sequence
  source: /note="Description of Artificial Sequence: Synthetic single chain variable fragment"
EIVMTQSPATLSLSPGERATLSCRASQDISKYLNWYQQKPGQAPRLLIYHTSRLHSGIPARFSGSGSGTDYTLTISSLQPEDFAVYFCQQGNTLPYTFGQGTKLEIKGGGGSGGGGSGGGGSQVQLQESGPGLVKPSETLSLTCTVSGVSLPDYGVSWIRQPPGKGLEWIGVIWGSETTYYQSSLKSRVTISKDNSKNQVSLKLSSVTAADTAVYYCAKHYYYGGSYAMDYWGQGTLVTVSSGGGGSGGGGSGGGGSGGGGSEVQLQQSGPGLVKPSQTLSLTCAISGDSVSSNSAAWNWIRQSPSRGLEWLGRTYYRSKWYNDYAVSVKSRITINPDTSKNQFSLQLNSVTPEDTAVYYCARDLGWIAVAGTFDYWGQGTLVTVSSGGGGSGGGGSGGGGSQSALTQPASVSGSPGQSITISCTGTSSDVGGYNYVSWYQQHPGKAPKLMIYDVSKRPSGVSNRFSGSKSGNTASLTISGLQAEDEADYYCSSYTSSSLNHVFGTGTKVTVLT

SEQ ID NO: 5867 - protein, 251 aa, Artificial Sequence
  source: /note="Description of Artificial Sequence: Synthetic single chain variable fragment"
QVQLVESGGGVVQPGRSLRLSCAASGFTFRDYYMAWVRQAPGKGLEWVASISYEGNPYYGDSVKGRFTISRDNAKSTLYLQMSSLRAEDTAVYYCARHDHNNVDWFAYWGQGTLVTVSSGGGGSGGGGSGGGGSGGGGSDIVMTQTPLSLSVTPGQPVSMSCKSSQSLLYSENKKNYLAWYLQKPGQSPQLLIFWASTRESGVPDRFSGSGSGTDFTLKISRVEAEDVGVYYCQQYYNFPTFGQGTKLEIK

SEQ ID NO: 5868 - protein, 251 aa, Artificial Sequence
  source: /note="Description of Artificial Sequence: Synthetic single chain variable fragment"
QVQLVQSGAEVKKPGASVKVSCKASGFTFRDYYMAWVRQAPGQRLEWMGSISYEGNPYYGDSVKGRVTITRDNSASTLYMELSSLRSEDTAVYYCARHDHNNVDWFAYWGQGTLVTVSSGGGGSGGGGSGGGGSGGGGSDIQMTQSPSSLSASVGDRVTITCKSSQSLLYSENKKNYLAWYQQKPGKVPKLLIFWASTRESGVPSRFSGSGSGTDFTLTISSLQPEDVATYYCQQYYNFPTFGQGTKLEIK

SEQ ID NO: 5869 - protein, 251 aa, Artificial Sequence
  source: /note="Description of Artificial Sequence: Synthetic single chain variable fragment"
EVQLVQSGAEVKKPGESLKISCKGSGFTFRDYYMAWVRQMPGKGLEWMGSISYEGNPYYGDSVKGQVTISRDNSISTLYLQWSSLKASDTAMYYCARHDHNNVDWFAYWGQGTLVTVSSGGGGSGGGGSGGGGSGGGGSEIVMTQSPATLSLSPGERATLSCKSSQSLLYSENKKNYLAWYQQKPGQAPRLLIFWASTRESGIPARFSGSGSGTDFTLTISSLQPEDLAVYYCQQYYNFPTFGQGTKLEIK

SEQ ID NO: 5870 - protein, 251 aa, Artificial Sequence
  source: /note="Description of Artificial Sequence: Synthetic single chain variable fragment"
EVQLVQSGAEVKKPGESLKISCKGSGFTFRDYYMAWVRQMPGKGLEWMGSISYEGNPYYGDSVKGQVTISRDNSISTLYLQWSSLKASDTAMYYCARHDHNNVDWFAYWGQGTLVTVSSGGGGSGGGGSGGGGSGGGGSDIQMTQSPSSLSASVGDRVTITCKSSQSLLYSENKKNYLAWYQQKPGKVPKLLIFWASTRESGVPSRFSGSGSGTDFTLTISSLQPEDVATYYCQQYYNFPTFGQGTKLEIK

SEQ ID NO: 5871 - protein, 251 aa, Artificial Sequence
  source: /note="Description of Artificial Sequence: Synthetic single chain variable fragment"
QVQLVQSGAEVKKPGASVKVSCKASGFTFRDYYMAWVRQAPGQGLEWMGSISYEGNPYYGDSVKGRVTMTRDNSTSTLYMELSSLRSEDTAVYYCARHDHNNVDWFAYWGQGTLVTVSSGGGGSGGGGSGGGGSGGGGSEIVMTQSPATLSLSPGERATLSCKSSQSLLYSENKKNYLAWYQQKPGQAPRLLIFWASTRESGIPARFSGSGSGTDFTLTISSLQPEDLAVYYCQQYYNFPTFGQGTKLEIK

SEQ ID NO: 5872 - protein, 251 aa, Artificial Sequence
  source: /note="Description of Artificial Sequence: Synthetic single chain variable fragment"
QVQLVQSGAEVKKPGASVKVSCKASGFTFRDYYMAWVRQAPGQGLEWMGSISYEGNPYYGDSVKGRVTMTRDNSTSTLYMELSSLRSEDTAVYYCARHDHNNVDWFAYWGQGTLVTVSSGGGGSGGGGSGGGGSGGGGSDIQMTQSPSSLSASVGDRVTITCKSSQSLLYSENKKNYLAWYQQKPGKVPKLLIFWASTRESGVPSRFSGSGSGTDFTLTISSLQPEDVATYYCQQYYNFPTFGQGTKLEIK

SEQ ID NO: 5873 - protein, 111 aa, Artificial Sequence
  source: /note="Description of Artificial Sequence: Synthetic single chain variable fragment"
ELVLTQSPKFMSTSVGDRVSVTCKASQNVGTNVAWYQQKPGQSPKPLIYSATYRNSGVPDRFTGSGSGTDFTLTITNVQSKDLADYFYFCQYNRYPYTSGGGTKLEIKRRS

SEQ ID NO: 5874 - protein, 245 aa, Artificial Sequence
  source: /note="Description of Artificial Sequence: Synthetic single chain variable fragment"
EVQLVESGGGLVKPGGSLKLSCAASGFAFSIYDMSWVRQTPEKRLEWVAYISSGGGTYYPDTVKGRFTISRDNAKNTLYLQMSSLKSEDTAMYYCARHSGYGTHWGVLFAYWGQGTLVTVSAGGGGSGGGGSGGGGSDIQMTQTTSSLSASLGDRVTISCRASQDISNYLNWYQQKPDGTVKLLIYYTSILHSGVPSRFSGSGSGTDYSLTISNLEQEDFATYFCQQGNTLPWTFGGGTKLEIKA

SEQ ID NO: 5875 - protein, 245 aa, Artificial Sequence
  source: /note="Description of Artificial Sequence: Synthetic single chain variable fragment"
EVQLVESGGGLVKPGGSLKLSCAASGFAFSIYDMSWVRQTPEKRLEWVAYISSGGGTYYPDTVKGRFTISRDNAKNTLYLQMSSLKSEDTAMYYCARHSGYGSSYGVLFAYWGQGTLVTVSAGGGGSGGGGSGGGGSDIQMTQTTSSLSASLGDRVTISCRASQDISNYLNWYQQKPDGTVKLLIYYTSILHSGVPSRFSGSGSGTDYSLTISNLEQEDFATYFCQQGNTLPWTFGGGTKLEIKA

SEQ ID NO: 5876 - protein, 236 aa, Artificial Sequence
  source: /note="Description of Artificial Sequence: Synthetic single chain variable fragment"
QVQLQQSGPGLVKPSQTLSLTCAISGDSVSSNSAAWNWIRQSPSRGLEWLGRTYYRSKWYNDYAVSVKSRITINPDTSKNQFSLQLNSVTPEDTAVYYCAREVTGDLEDAFDIWGQGTMVTVSSGGGGSDIQMTQSPSSLSASVGDRVTITCRASQTIWSYLNWYQQRPGKAPNLLIYAASSLQSGVPSRFSGRGSGTDFTLTISSLQAEDFATYYCQQSYSIPQTFGQGTKLEIK

SEQ ID NO: 5877 - protein, 254 aa, Artificial Sequence
  source: /note="Description of Artificial Sequence: Synthetic single chain variable fragment"
EVQLQQSGPGLVKPSQTLSLTCAISGDSVSSNSAAWNWIRQSPSRGLEWLGRTYYRSKWYSDYAVSVKSRITINPDTSKNQFSLQLNSVTPEDTAVYYCARDPYDFWSGYPDAFDIWGQGTMVTVSSGGGGSGGGGSGGGGSQSALTQPASVSGSPGQSITISCTGTSSDVGGYNYVSWYQQHPGKAPKVIISEVNNRPSGVSHRFSGSKSGNTASLTISGLQAEDEADYFCSSYTSGRTLYVFGTGSKVTVLG

SEQ ID NO: 5878 - protein, 251 aa, Artificial Sequence
  source: /note="Description of Artificial Sequence: Synthetic single chain variable fragment"
EVQLQQSGPGLVKPSQTLSLTCAISGDSVSNNNAAWNWIRQSPSRGLEWLGRTYHRSTWYNDYVGSVKSRITINPDTSKNQFSLQLNSVTPEDTAVYYCARETDYGDYGAFDIWGQGTTVTVSSGGGGSGGGGSGGGGSQSALTQPASVSGSPGQSITISCTGSRNDIGAYESVSWYQQHPGNAPKLIIHGVNNRPSGVFDRFSVSQSGNTASLTISGLQAEDEADYYCSSHTTTSTLYVFGTGTKVTVLG

SEQ ID NO: 5879 - protein, 247 aa, Artificial Sequence
  source: /note="Description of Artificial Sequence: Synthetic single chain variable fragment"
EVQLQQSGPGLVNPSQTLSITCAISGDSVSSNSAAWNWIRQSPSRGLEWLGRTFYRSKWYNDYAVSVKGRITISPDTSKNQFSLQLNSVTPEDTAVYYCAGGDYYYGLDVWGQGTTVTVSSGGGGSGGGGSGGGGSQSALTQPASVSGSPGQSITISCTGSSSDVGGYNSVSWYQQHPGKAPKLMIYEVINRPSGVSHRFSGSKSGNTASLTISGLQAEDEADYYCSSYTSSSTYVFGTGTKVTVLG

SEQ ID NO: 5880 - protein, 254 aa, Artificial Sequence
  source: /note="Description of Artificial Sequence: Synthetic single chain variable fragment"
EVQLQQSGPGLVKPSQTLSLTCAISGDSVLSNSDTWNWIRQSPSRGLEWLGRTYHRSTWYDDYASSVRGRVSINVDTSKNQYSLQLNAVTPEDTGVYYCARDRLQDGNSWSDAFDVWGQGTMVTVSSGGGGSGGGGSGGGGSQSALTQPASVSGSPGQSITISCTGSSSDIGGFNYVSWYQQHAGEAPKLMIYEVTNRPSGVSDRFSGSKSDNTASLTISGLQAEDEADYYCSSYASGSPLYVFGTGTKVTVLG

SEQ ID NO: 5881 - protein, 254 aa, Artificial Sequence
  source: /note="Description of Artificial Sequence: Synthetic single chain variable fragment"
EVQLQQSGPGLVKPSQTLSLTCAISGDSVLSNSDTWNWIRQSPSRGLEWLGRTYHRSTWYDDYASSVRGRVSINVDTSKNQYSLQLNAVTPEDTGVYYCARDRLQDGNSWSDAFDVWGQGTMVTVSSGGGGSGGGGSGSGGSQSALTQPASVSGSPGQSITFSCTGTSSDIGGYNYVSWYQQHPGKAPKLMIYEVSNRPSGVSNRFSGTKSGNTASLTISGLQAEDEADYYCSSYTSSSTLYVFGTGTKLTVLG

SEQ ID NO: 5882 - protein, 254 aa, Artificial Sequence
  source: /note="Description of Artificial Sequence: Synthetic single chain variable fragment"
QVQLQESGPGLVKPSQTLSLTCAISGDSVLSNSDTWNWIRQSPSRGLEWLGRTYHRSTWYDDYASSVRGRVSINVDTSKNQYSLQLNAVTPEDTGVYYCARDRLQDGNSWSDAFDVWGQGTMVTVSSGGGGSGGGGSGSGGSQSALTQPASVSGSPGQSITISCTGTSSDVGGYNYVSWYQQHPGKAPKLMIYEVSNRPSGVSNRFSGSKSGNTASLTISGLQAEDEADYYCSSYTSSSTLYVFGTGTKVTVLG

SEQ ID NO: 5883 - protein, 254 aa, Artificial Sequence
  source: /note="Description of Artificial Sequence: Synthetic single chain variable fragment"
EVQLQQSGPGLVKPSQTLSLTCAISGDSVLSNSDTWNWIRQSPSRGLEWLGRTYHRSTWYDDYASSVRGRVSINVDTSKNQYSLQLNAVTPEDTGVYYCARDRLQDGNSWSDAFDVWGQGTMVTVSSGGGGSGGGGSGGGGSQSALTQPASVSGSPGQSITISCTGTSSDVGGYNYVSWYQQHPGKAPKLMIYDVSNRPSGVSNRFSGSKSGNTASLTISGLQAEDEADYYCSSYTSSSTLYVFGTGTKVTVLG

SEQ ID NO: 5884 - protein, 254 aa, Artificial Sequence
  source: /note="Description of Artificial Sequence: Synthetic single chain variable fragment"
EVQLQQSGPGLVKPSQTLSLTCAISGDSVLSNSDTWNWIRQSPSRGLEWLGRTYHRSTWYDDYASSVRGRVSINVDTSKNQYSLQLNAVTPEDTGVYYCARDRLQDGNSWSDAFDVWGQGTMVTVSSGGGGSGGGGSGGGGSQSALTQPASVSGSPGQSITISCTGTSSDVGGYNYVSWYQQHPGKAPKLMIYEVSNRPSGVSNRFSGSKSGNTASLTISGLQAEDEADYYCSSYTSSSTLYIFGTGTKVTVLG

SEQ ID NO: 5885 - protein, 253 aa, Artificial Sequence
  source: /note="Description of Artificial Sequence: Synthetic single chain variable fragment"
EVQLQQSGPGLVKPSQTLPLTCAISGDSVLSNSDTWNWIRQSPSRGLEWLGRTYHRSTWYDDYASSVRGRVSINVDTSKNQYSLQLNAVTPEDTGVYYCARVRLQDGNSWSDAFDVWGQGTMVTVSSGGGGSGGGGSGGGGPQSALTQPASASGSPGQSVTISCTGTSSDVGGYNYVSWYQQHPGKAPKLMIYDVSNRPSGVSNRFSGSKSGNTASLTISGLQAEDEADYYCSSYTSSSTLYVFGTGTQLTVL

SEQ ID NO: 5886 - protein, 253 aa, Artificial Sequence
  source: /note="Description of Artificial Sequence: Synthetic single chain variable fragment"
EVQLQQSGPGLVKPSQTLSLTCAISGDSMLSNSDTWNWIRQSPSRGLEWLGRTYHRSTWYDDYASSVRGRVSINVDTSKNQYSLQLNAVTPEDTGVYYCARVRLQDGNSWSDAFDVWGQGTMVTVSSGGGGSGGGGSGGGGSQSALTQPASASGSPGQSVTISCTGTSSDVGGYNYVSWYQQHPGKAPKLMIYDVSNRPSGVSNRFSGSKSGNTASLTISGLQAEDEADYYCSSYTSSSTLYVFGTGTQLTVL

SEQ ID NO: 5887 - protein, 251 aa, Artificial Sequence
  source: /note="Description of Artificial Sequence: Synthetic single chain variable fragment"
QVQLVQSGGGLIQPGGSLRLSCAASGFTVSSNYMSWVRQAPGKGLEWVSVIYSGGSTYYADSVKGRFTISRDNSKNTLYLQMNSLRAEDTAVYYCASQSTPYDSSGYYSGDAFDIWGQGTMVTVSSGGGGSGGGGSGGGGSSYVLTQPPSASGTPGQRVTISCSGSSSNIGSNYVYWYQQLPGTAPKLLIYRNNQRPSGVPDRFSGSKSGTSASLAISGLRSEDEADYYCAAWDDSLSGYVFGTGTKLTVL

SEQ ID NO: 5888 - protein, 251 aa, Artificial Sequence
  source: /note="Description of Artificial Sequence: Synthetic single chain variable fragment"
EVQLQQSGPGLVKPSQTLSLTCAISGDSVSSNSAAWNWIRQSPSRGLEWLGRTYYRSKWYNDYAVSVKSRITINPDTSKNQFSLQLNSVTPEDTAVYYCARDLGWIAVAGTFDYWGQGTLVTVSSGGGGSGGGGSGGGGSQSALTQPASVSGSPGQSITISCTGTSSDVGGYNYVSWYQQHPGKAPKLMIYDVSKRPSGVSNRFSGSKSGNTASLTISGLQAEDEADYYCSSYTSSSLNHVFGTGTKVTVL

SEQ ID NO: 5889 - protein, 253 aa, Artificial Sequence
  source: /note="Description of Artificial Sequence: Synthetic single chain variable fragment"
EVQLQQSGPGLVKPSQTLSLTCAISGDSVLSNSDTWNWIRQSPSRGLEWLGRTYHRSTWYDDYASSVRGRVSINVDTSKNQYSLQLNAVTPEDTGAYYCARDRLQDGNSWSDAFDVWGQGTMVTVSSGGGGSGGGGSGGGGSQSALTQPASVSGSPGQSITISCTGTSSDVGGYNYVSWYQQHPGKAPKLMIYDVSNRPSGVSNRFSGSKSGNTASLTISGLQAEDEADYYCSSYTSSSTPYVFGTGTQLTVL

SEQ ID NO: 5890 - protein, 246 aa, Artificial Sequence
  source: /note="Description of Artificial Sequence: Synthetic single chain variable fragment"
EVQLVESGGGLVQPGRSLRLSCAASGFTFDDYAMHWVRQAPGKGLEWVSGISWNSGSIGYADSVKGRFTISRDNAKNSLYLQMNSLRAEDTALYYCAKGLSSWHFHDALDIWGQGTMVTVSSGGGGSGGGGSGGGGSSSELTQDPAVSVALGQTVRITCQGDSLRSYYASWYQQKPGQAPVLVIYGKNNRPSGIPDRFSGSSSGNTASLTITGAQAEDEADYYCNSRDSSGNHLWVFGGGTKLTVL

SEQ ID NO: 5891 - protein, 245 aa, Artificial Sequence
  source: /note="Description of Artificial Sequence: Synthetic single chain variable fragment"
EVQLVESGGGLVQPGRSLRLSCAASGFTFDDYAMHWVRQAPGKGLEWVSGISWNSGSIGYADSVKGRFTISRDNAKNSLYLQMNSLRAEDTALYYCAKDKGGGYYDFWSGSDYWGQGTLVTVSSGGGGSGGGGSGGGGSSSELTQDPAVSVALGQTVRITCQGDSLRSYYASWYQQKPGQAPVLVIYGKNNRPSGIPDRFSGSSSGNTASLTITGAQAEDEADYYCNSRDSSGWVFGGGTKLTVL

SEQ ID NO: 5892 - protein, 247 aa, Artificial Sequence
  source: /note="Description of Artificial Sequence: Synthetic single chain variable fragment"
EVQLQQSGPGLVKPSLTLSLTCAISGDSVSSNSATWTWIRQSPSRGLEWLGRTYYRSTWYNDYAVSVKSRITINPDTSKNQFSLQLNSVTPEDTAVYYCAREGSGSYYAYWGQGTLVTVSSGGGGSGGGGSGGGGSQSALTQPASVSGSPGQSITISCTGTSSDVGGYNYVSWYQQHPGKAPKLMIYDVSNRPSGVSNRFSGSKSGNTASLTISGLQAEDEADYYCSSYTSSSTLYVFGTGTKVTVL

SEQ ID NO: 5893 - protein, 247 aa, Artificial Sequence
  source: /note="Description of Artificial Sequence: Synthetic single chain variable fragment"
QVQLVQSGAEVKKPGASVKVSCKASGYTFTGYYMHWVRQAPGQGLEWMGWINPNSGGTNYAQKFQGRVTMTRDTSISTAYMELSRLRSDDTAVYYCARDYWGYYGSGTLDYWGQGTLVTVSSGGGGSGGGGSGGGGSQSALTQPGSVSGSPGQSITISCTGTSSDVGGYNYVSWYQQHPGKAPKLIIYDVSSRPSGVSNRFSGSQSGNTASLTISGLQAEDEADYSCSSYAGSNTLVFGTGTKVTVL

SEQ ID NO: 5894 - protein, 254 aa, Artificial Sequence
  source: /note="Description of Artificial Sequence: Synthetic single chain variable fragment"
QVQLVQSGAEVKKPGASVKVSCKASGYTFTSYGISWVRQAPGQGLEWMGWISAYNGNTNYAQKLQGRVTMTTDTSTSTAYMELRSLRSDDTAVYYCARAGLALYSNYVPYYYYGMDVWGQGTTVTVSSGGGGSGGGGSGGGGSNFMLTQPHSVSESPGKTVTISCTRSSGSIASNYVQWYQQRPGSSPTTVIYEDNQRPSGVPDRFSGSIDSSSNSASLTISGLKTEDEADYYCQSYDSSNPWVFGGGTKLTVL

SEQ ID NO: 5895 - protein, 241 aa, Artificial Sequence
  source: /note="Description of Artificial Sequence: Synthetic single chain variable fragment"
EVQLVESGGGLVKPGGSLRLSCVASGFTFSNAWMNWVRQAPGKGLEWVGRIKSKTDGGTADYAAPVKGRFTISRDDSKNTMYLQMNSLKTEDTGVYYCITGATDVWGQGTTVTVSSGGGGSGGGGSGGGGSSYVLTQPPSASGTPGQRVTISCSGSSSNIGSNYVYWYQQLPGTAPKLLIYRNNQRPSGVPDRFSGSKSGTSASLAISGLRSEDEADYYCAAWDDSLSGPVFGGGTKLTVL

SEQ ID NO: 5896 - protein, 254 aa, Artificial Sequence
  source: /note="Description of Artificial Sequence: Synthetic single chain variable fragment"
EVQLQQSGPGLVKPSQTLSLTCAISGDSVLSNSDTWNWIRQSPSRGLEWLGRTYHRSTWYDDYASSVRGRVSINVDTSKNQYSLQLNAVTPEDTGVYYCARDRLQDGNSWSDAFDVWGQGTMVTVSSGGGGSGGGGSGGGGSQSALTQPASVSGSPGQSITISCTGTSSDVGGYNYVSWYQQHPGKAPKLMIYDVSNRPSGVSNRFSGSKSGNTASLTISGLQAEDEADYYCSSYTSSSTLVYVFGTGTKVTVL

SEQ ID NO: 5897 - protein, 249 aa, Artificial Sequence
  source: /note="Description of Artificial Sequence: Synthetic single chain variable fragment"
EVQLQQSGPGLVKPSQTLSLTCAISGDSVSSNSAAWNWIRQSPSRGLEWLGRTYYRSKWYNDYAVSVKSRITINPDTSKNQFSLQLNSVTPEDTAVYYCAREESSSGWYEGNWFDPWGQGTLVTVSSGGGGSGGGGSGGGGSSSELTQDPAVSVALGQTVRITCQGDSLRSYYASWYQQKPGQAPVLVIYGKNHRPSGIPDRFSGSSSGDTDSLTITGAQAEDEADYYCHSRDSSGNHLFGGGTKLTVL

SEQ ID NO: 5898 - protein, 253 aa, Artificial Sequence
  source: /note="Description of Artificial Sequence: Synthetic single chain variable fragment"
EVQLQQSGPGLVKPSQTLSLTCAISGDSVLSNSDTWNWIRQSPSRGLEWLGRTYHRSTWYDDYASSVRGRVSINVDTSKNQYSLQLNAVTPEDTGVYYCARDRLQDGNSWSDAFDVWGQGTMVTVSSGGGGSGGGGSGGGGSQSALTQPASASGSPGQSVTISCTGTSSDVGGYNYVSWYQQHPGKAPKLMIYDVSNRPSGVSNRFSGSKSGNTASLTISGLQAEDEADYYCSSYTSSSTLYVFGTGTQLTVL

SEQ ID NO: 5899 - protein, 245 aa, Artificial Sequence
  source: /note="Description of Artificial Sequence: Synthetic single chain variable fragment"
QVQLQESGPGLVKPSETLSLTCTVSGGSISSSSYYWGWIRQPPGKGLEWIGSIYYSGSTYYNPSLKSRVTISVDTSKNQFSLKLSSVTAADTAVYYCARGRMDTAMAQIWGQGTMVTVSSGDGGSGGGGSGGGGSNFMLTQPHSVSESPGKTVTIPCTGSSGSFASSYVQWYQQRPGSAPATVIYEDNQRPSGVPDRFSGSVDSSSNSASLTISGLKTEDEAVYYCQSYDGATWVFGGGTKLTVL

SEQ ID NO: 5900 - protein, 242 aa, Artificial Sequence
  source: /note="Description of Artificial Sequence: Synthetic single chain variable fragment"
QVQLVQSGAEVKKPGASVKVSCKASGYTFTSYYMHWVRQAPGQGLEWMGIINPSGGSTSYAQKFQGRVTMTRDTSTSTVYMELSSLRSEDTAVYYCARDLDVSLDIWGQGTMVTVSSGGGGSGGGGSGGGGSQSALTQPASVSGSPGQSITISCSGTSSDVGGYNSVSWYQQYPGKAPKLMIYDVNNRPSGVSSRFSGSKSGNTASLTISGLQAEDEADYYCSSYTSSSTLFFGAGTKVTVL

SEQ ID NO: 5901 - protein, 247 aa, Artificial Sequence
  source: /note="Description of Artificial Sequence: Synthetic single chain variable fragment"
EVQLVESGGGLVQPGGSLRLSCAASGFTFSSYAMHWVRQAPGKGLEYVSAISSNGGSTYYANSVKDRFTISRDNSKNTLYLQMGSLRAEDMAVYYCARVHSSGYYHPGPNDYWGQGTLVTVSSGGGGSGGGGSGGGGSSSELTQDPAVSVALGQTVRITCQGDSLRTYYATWYQQKPGQAPVLVFYDENNRPSGIPDRFSGSSSGNTASLTITGTQAEDEADYYCSSRDSSGNPSCVFGGGTKLTVL

SEQ ID NO: 5902 - protein, 243 aa, Artificial Sequence
  source: /note="Description of Artificial Sequence: Synthetic single chain variable fragment"
EVQLVESGAEVKKPGASVKVSCKASGYTFTSYYMHWVRQAPGQGLEWMGIINPSGGSTSYAQKFQGRVTMTRDTSTSTAYMELSSLRSEDTAVYYCAREAGVVAVDYWGQGTLVTVSSGGGGSGGGGSGGGGSQSALTQPASVSGSPGQSITISCTGTSSDVGGYNYVSWYQQHPGKAPKLMIYDVSNRPSGVSNRFSGSKSGNTASLTISGLQAEDEADYYCSSYTSSSTWVFGGGTKLTVL

SEQ ID NO: 5903 - protein, 250 aa, Artificial Sequence
  source: /note="Description of Artificial Sequence: Synthetic single chain variable fragment"
QVQLVQSGGGVVQPGRSLRLSCAASGFTFSSYAMSWVRQAPGKGLEWVSAISGSGGSTYYADSVKGRFTISRDNSKNTLYLQMNSLRAEDTAVYYCAKEPLFGVVEEDVDYWGQGTLVTVSSGGGGSGGGGSGGGGSDVVMTQSPLSLPVTPGEPASISCRSSQSLLAGNGHNYLDWYLQKPGQSPQLLIYLGSNRASGVPDRFSGSGSGTDFTLKISRVEAEDVGVYYCMQALQNPLTFGGGTKLEIKR

SEQ ID NO: 5904 - protein, 245 aa, Artificial Sequence
  source: /note="Description of Artificial Sequence: Synthetic single chain variable fragment"
QVQLVQSGAEVKKPGASVKVSCKASGYTFTSYYMHWVRQAPGQGLEWMGIINPSGGSTSYAQKFQGRVTMTRDTSTSTVYMELSSLRSEDTAVYYCARGSGSLGDAFDIWGQGTMVTVSSGGGGSGGGGSGGGGSQSALTQPASVSGSPGQSITISCTGSSSDVGGYNYVSWYQQHPGKAPKLMIYEVSNRPSGVSNRFSGSKSGNTASLTISGLQAEDEADYYCSSYTSSSTLVFGTGTKVTVL

SEQ ID NO: 5905 - protein, 246 aa, Artificial Sequence
  source: /note="Description of Artificial Sequence: Synthetic single chain variable fragment"
QVQLVQSGAEVKKPGASVKVSCKASGYTFTSYYMHWVRQAPGQGLEWMGIINPSGGSTSYAQKFQGRVTMTRDTSTSTVYMELSSLRSEDTAVYYCARDGFGELSGAFDIWGQGTMVTVSSGGGGSGGGGSGGGGSQSALTQPASVSGSPGQSITISCTGTSSDVGGYNYVSWYQQHPGKAPKLMIYDVSNRPSGVSNRFSGSKSGNTASLTISGLQAEDEADYYCSSYASSSTLVFGGGTKVTVL

SEQ ID NO: 5906 - protein, 247 aa, Artificial Sequence
  source: /note="Description of Artificial Sequence: Synthetic single chain variable fragment"
EVQLVESGAEVKKPGASVKVSCKASGYTFTSYYMHWVRQAPGQGLEWMGIINPSGGSTSYAQKFQGRVTMTRDTSTSTVYMELSSLRSEDTAVYYCARGPIGCSGGSCLDYWGQGTLVTVSSGGGGSGGGGSGGGGSQSALTQPAYVSGSPGQSITISCTGTNSDVGRYNYVSWYQQHPGKAPKLMIYEVSYRPSGVSNRFSGSKSGNTASLTISGLQAEDEADYYCSSYTTSSTLDFGTGTKVTVL

SEQ ID NO: 5907 - protein, 246 aa, Artificial Sequence
  source: /note="Description of Artificial Sequence: Synthetic single chain variable fragment"
QVQLVQSGAEVKKPGASVKVSCKASGYTFTSYYMHWVRQAPGQGLEWMGIINPSGGSTSYAQKFQGRVTMTRDTSTSTVYMELSSLRSEDTAVYYCARGSYGDYGDAFDIWGQGTTVTVSSGGGGSGGGGSGSGGSQSALTQPASVSGSPGQSITISCTGTSSDVGGYKYVSWYQQHPGKAPKLMIYDVSNRPSGVSNRFSGSKSGNTASLTISGLQAEDEADYYCSSYTSSSTLVFGGGTKLTVL

SEQ ID NO: 5908 - protein, 244 aa, Artificial Sequence
  source: /note="Description of Artificial Sequence: Synthetic single chain variable fragment"
EVQLVESGAEVKKPGSSVKVSCKASGGTFSSYAISWVRQAPGQGLEWMGGIIPIFGTANYAQKFQGRVTITADESTSTAYMELSSLRSEDTAVYYCARDHKVVRFGYWGQGTLVTVSSGGGGSGGGGSGGGGSHVILTQPPSASASLGASVKLTCTLSSGHSSYAIAWHQQQPEKGPRYLMKVNSDGSLSKGDGIPDRFSGSTSGAERYLTISSLQSEDEADYYCQTWGSGMAIFGGGTKLTVL

SEQ ID NO: 5909 - protein, 241 aa, Artificial Sequence
  source: /note="Description of Artificial Sequence: Synthetic single chain variable fragment"
QVQLVQSGAEVKKPGASVKVSCKASGYTFTSYYMHWVRQAPGQGLEWMGIINPSGGSTSYAQKFQGRVTMTRDTSTSTVYMELSSLRSEDTAVYYCARGDYYMDVWGKGTTVTVSSGGGGSGGGGSGGGGSQSALTQPASASGSPGQSVTISCTGTSSDVGGYNYVSWYQQHPGKAPKLMIYEVSKRPSGVPDRFSGSKSGNTASLTISGLQAEDEADYYCSSYTSSGTLVFGGGTKLTVL

SEQ ID NO: 5910 - protein, 247 aa, Artificial Sequence
  source: /note="Description of Artificial Sequence: Synthetic single chain variable fragment"
EVQLVESGGGLVQPGGSLRLSCAASGFTFSSYAMSWVRQAPGKGLEWVSYISSSSSTIYYADSVKGRFTISRDNAKNSLYLQMNSLRAEDTAVYYCARDGPIRYFDHSKAFDIWGQGTMVTVSSGGGGSGGGGSGGGGSSSELTQDPAVSVALGQTVRITCQGDSLRSYYASWYQQKPGQAPVLVIYGKNNRPSGIPDRFSGSSSGNTASLTITGAQAEDEADYYRNSRDSSGNPYVFGTGTKVTVL

SEQ ID NO: 5911 - protein, 244 aa, Artificial Sequence
  source: /note="Description of Artificial Sequence: Synthetic single chain variable fragment"
QVQLVQSGAEVKKPGASVKVSCKASGYTFTSYYMHWVRQAPGQGLEWMGIINPSGGSTSYAQKFQGRVTMTRDTSISTAYMELSRLRSDDTAVYYCAREMDDSSGPDYWGQGTLVTVSSGGGGSGGGGSGGGGSQSALTQPASVSGSPGQSITISCTGTSSDVGGYNYVSWYQQHPGKAPKLMIYEVSNRPSGVSNRFSGSKSGNTASLTISGLQAEDEADYYCSSYTSSSTLVFGTGTKLTVL

SEQ ID NO: 5912 - protein, 252 aa, Artificial Sequence
  source: /note="Description of Artificial Sequence: Synthetic single chain variable fragment"
EVQLVESGAEVKKPGESLKISCKGSGYSFTGSWIGWGRQMPGKGLEWMGIIYPGDSDTRYSPSFQGQVTISADKSISTAYLQWSSLKASDTAMYYCARGFLRGGDCCGALDIWGQGTMVTVSSGGGGSGGGGSGGGGSDIVMTQSPLSLPVTPGEPASISCRSSQSLLHSNGYNYLDWYLQKPGQSPQLLIYLGSNRASGVPDRFSGSGSGTDFTLKISRVEAEDVGVYYCMQALQTPPWTFGQGTKLEIKR

SEQ ID NO: 5913 - protein, 250 aa, Artificial Sequence
  source: /note="Description of Artificial Sequence: Synthetic single chain variable fragment"
QVQLQESGPGLVKPSETLSLTCSVSGGSINSYYWSWIRQAPGKGLEWIAFTSHSGNVKYNPSLTGRVTIAVDTSKNQFYLEVTSVTAADTAVYFCARGLDPLFAYDAFEIWGLGTMVTVSSGGGGSGGGGSGGGGSEIVLTQSPLSLPVTPGEPASISCRSSQSLLHSNGYNYLDWYLQKPGQSPQLLIYLGSNRASGVPDRFSGSGSGTDFTLKISRVEAEDVGVYYCMQVLQTPPLTFGGGTKVDIKR

SEQ ID NO: 5914 - protein, 247 aa, Artificial Sequence
  source: /note="Description of Artificial Sequence: Synthetic single chain variable fragment"
EVQLVESGGGLVKPGGSLRLSCAASGFTFSDYYMSWIRQAPGKGLEWVSYISSSGSTIYYADSVKGRFTISRDNAKNSLYLQMNSLRAEDTAVYYCARDDFWSGSVDYWGQGTLVTVSSGGGGSGGGGSGGGGSGGGGSSYVLTQPPSVSVAPGKTATITCGGTNIGSKNVHWYQQKPGQAPVLAIYYDSDRPSGIPERFSGSNSGNTATLTISRVEAGDEADYFCQVWDSSSDHWVFGGGTKLTVL

SEQ ID NO: 5915 - protein, 250 aa, Artificial Sequence
  source: /note="Description of Artificial Sequence: Synthetic single chain variable fragment"
QVQLVQSGAEVKKPGASVKVSCKASGYTFTSYYMHWVRQAPGQGLEWMGIINPSGGSTSYAQKFQGRVTMTRDTSTSTVYMELSSLRSEDTAVYYCAREDDSSGYTSPFDYWGQGTLVTVSSGGGGSGGGGSGGGGSGGGRSSYELTQPPSVSVAPGETASIACGGHNIRSKNVHWYQQKPGQAPVLVISYDGDRPSGIPERFSGSNLGSTATLTISRVEAGDEADYYCQVWDSDSDHYVFGTGTKVTVL

SEQ ID NO: 5916 - protein, 252 aa, Artificial Sequence
  source: /note="Description of Artificial Sequence: Synthetic single chain variable fragment"
EVQLVESGAEVKKPGASVKVSCKASGYTFTGYYMHWVRQAPGQGLEWMGWINPNSGGTNYAQKFQGRVTMTRDTSISTAYMELSRLRSDDTAVYYCAREPASSSWYGYYYYMDVWGKGTLVTVSSGGGGSGGGGSGGGGSGGGGSDIQMTQSPSSLSASVGDRVTITCRASQSINTYLNWYQQKPGKPPKLLIYAASNLQSGVPSRFSGSGSGTHFTLTISSLQPDDFATYYCQQSYSSLLTFGGGTKLEIK

SEQ ID NO: 5917 - protein, 252 aa, Artificial Sequence
  source: /note="Description of Artificial Sequence: Synthetic single chain variable fragment"
QVQLVQSGAEVKKPGASVKVSCKASGYTFTSYDINWVRQATGQGLEWMGWMNPNSGNTGYAQKFQGRVTMTRNTSISTAYMELSSLRSEDTAVYYCARGDSNYWSYYGMDVWGQGTLVTVSSGGGGSGGGGSGGGGSGGGGSQSVLTQPRSVSGSPGQSVTISCTGTSSDVGGYNYVSWYQQHPGEAPKLIIYDADKRPSGISNRFSSGKSGNTASLTISGLQVEDEADYYCCSYAGGSTWVFGGGTKVTVL

SEQ ID NO: 5918 - protein, 247 aa, Artificial Sequence
  source: /note="Description of Artificial Sequence: Synthetic single chain variable fragment"
QVQLVQSGAEVKKPGASVKVSCKASGYTFTSYGISWVRQAPGQGLEWMGWISAYNGNTNYAQKLQGRVTMTTDTSTSTAYMELRSLRSDDTAVYYCASFSSSDSYDYWGQGTLVTVSSGGGGSGGGGSGGGGSGGGGSEIVLTQSPATLSVSPGERATLSCRASQSVTSNLAWYQQKPGQAPRLLIYAASTRATGIPARFSGSGSGTEFTLTISSMQSEDFAVYFCQQYHTWPPLTFGGGTKVEIKT

SEQ ID NO: 5919 - protein, 254 aa, Artificial Sequence
  source: /note="Description of Artificial Sequence: Synthetic single chain variable fragment"
QVNLRESGPALVKPTQTLTLTCTFSGFSLNTFGMSVSWIRQPPGKALEWLALIDWDDDKYYSTSLRTRLTISKDTAKNQVVLRMTNMDPMDTATYYCARIYGGDRTNTQAPYFFDLWGQGTLVTVSSGGGGSGGGGSGGGGSDVVMTQSPLSLPVTPGEPASISCRSSQSLLHSNGYNYLDWYLQKPGQSPQLLIYLGSNRASGVPDRFSGSGSGTDFTLKISRVEAEDVGVYYCMQALQTPWTFGQGTKLEIK

SEQ ID NO: 5920 - protein, 248 aa, Artificial Sequence
  source: /note="Description of Artificial Sequence: Synthetic single chain variable fragment"
QVQLQESGPGLVKPSGTLSLTCAVSGASITSRHWWNWVRHSPGKGLEWIGQIYHSGTTTYNPSLGSRVTISVDKSKNQISLELRSVTAADTATYYCVRDYLELATYYGMDVWGQGTTVTVSSGGGGSGGGGSGGGGSEIVLTQSPLSLPVTPGEPASISCRSSQSLLYSDGYNYLDWYLQKPGQSPQLLIYLGSNRASGVPDRFSGSGSGTDFTLQISGVETEDVGVYYCMQALQTQSFGQGTKLEIK

SEQ ID NO: 5921 - protein, 247 aa, Artificial Sequence
  source: /note="Description of Artificial Sequence: Synthetic single chain variable fragment"
QVQLVQSGAEVKKPGASVKVSCKASGYTFTSYYMHWVRQAPGQGLEWMGIINPSGGSTSYAQKFQGRVTMTRDTSTSTVYMELSSLRSEDTAVYYCARDLAAAGNYYYYGMDVWGQGTTVTVSSGGGGSGGGGSGGGGSSSELTQDPAVSVALGQTARITCQGDSLRSYFTSWYHQKPGQAPVLVIYGNNNRPSGIPDRFSGSSSGNTASLTITGAQAEDEGDYYCDSRDSSGDHLVFGGGTKLTVL

SEQ ID NO: 5922 - protein, 246 aa, Artificial Sequence
  source: /note="Description of Artificial Sequence: Synthetic single chain variable fragment"
QVQLVQSGAEVKKPGASVKVSCKASGYTFTSYYMHWVRQAPGQGLEWMGIINPSGGSTSYAQKFQGRVTMTRDTSTSTVYMELSSLRSEDTAVYYCARDDDFWSGSGAFDIWGQGTTVTVSSGGGGSGGGGSGGGGSSSELTQDPAVSVALGQTVRITCQGDSLRSYYASWYQQKPGQAPVLVIYGKNNRPSGIPDRFSGSSSGNTASLTITGAQAEDEADYYCNSRDSSGNHPVVFGGGTKLTVL

SEQ ID NO: 5923 - protein, 248 aa, Artificial Sequence
  source: /note="Description of Artificial Sequence: Synthetic single chain variable fragment"
QVQLVQSGAEVKKPGASVKVSCKASGYTFTSYYMHWVRQAPGQGLEWMGIINPSGGSTSYAQKFQGRVTMTRDTSTSTVYMELSSLRSEDTAVYYCARPEGVSYYDSSVLDYWGQGTLVTVSSGGGGSGGGGSGGGGSQSALTQPASVSGSPGQSITISCTGTSSDVGGYKHVSWYQHHPGKAPKLMIYDVSNRPSGVSNRFSGSKSGNTASLTVSGLQAEDEAHYYCVSYRNFNSLVFGTGTKVTVL

SEQ ID NO: 5924 - protein, 246 aa, Artificial Sequence
  source: /note="Description of Artificial Sequence: Synthetic single chain variable fragment"
QVQLVQSGAEVKKPGASVKVSCKASGYTFTSYYMHWVRQAPGQGLEWMGIINPSGGSTSYAQKFQGRVTMTRDTSTSTVYMELSSLRAEDTAVYYCARGGYGDYLDAFDIWGQGTTVTVSSGGGGSGGGGSGSGGSQSALTQPASVSGSPGQSITISCTGTSSDVGGYNYVSWYQQHPGKAPKLMIYEVSNRPSGVSNRFSGSKSGNTASLTISGLQAEDEADYYCSSYTSSSTLVFGTGTQLTVL

SEQ ID NO: 5925 - protein, 244 aa, Artificial Sequence
  source: /note="Description of Artificial Sequence: Synthetic single chain variable fragment"
QVQLQQSGAEVKKPGSSVKVSCKASGGTFSSYAISWVRQAPGQGLEWMGGIIPILGIANYAQKFQGRVTITADESTSTAYMELSSLRSEDTAVYYCATGGSGRYALDIWGQGTMVTVSSGGGGSGGGGSGGGGSEIVLTQSPATLSLSPGERATLSCRASQSVSSYLAWYQQKPGQAPRLLIYDASNRATGIPARFSGSGSGTDFTLTISSLEPEDFAVYYCQQRSNWPPSYTFGQGTKLEIKR

SEQ ID NO: 5926 - protein, 248 aa, Artificial Sequence
  source: /note="Description of Artificial Sequence: Synthetic single chain variable fragment"
QVQLQQSGAEVKKPGSSVKVSCKASGGTFSSYAISWVRQAPGQGLEWMGGIIPILGIANYAQKFQGRVTITADESTSTAYMELSSLRSEDTAVYYCARGGAGGSGSYYPLIWGQGTTVTVSSGGGGSGGGGSGGGGSEIVLTQSPATLSLSPGERATLSCGASQSVSSSYLAWYQQKPGQAPRLLIYDASSRATGIPARFSGSGSGTDFTLTISSLEPEDFAVYYCQQRSSWPPTWTFGQGTKLEIKR

SEQ ID NO: 5927 - protein, 242 aa, Artificial Sequence
  source: /note="Description of Artificial Sequence: Synthetic single chain variable fragment"
QVQLVQSGAEVKKPGSSVKVSCKASGGTFSSYAISWVRQAPGQGLEWMGGIIPILGTANYAQKFQGRVTITADESTSTAYMELSSLRSEDTAVYYCARWGGGAFDIWGQGTMVTVSSGGGGSGGGGSGGGGSEIVLTQSPGTLSLSPGERATLSCRASQSVGGYLAWYQQKPGQAPRLLIYDASNRATGIPARFSGSGSGTDFTLTISSLEPEDFAVYYCQQRNNWPPMYTFGQGTKLEIKR

SEQ ID NO: 5928 - protein, 436 aa, Artificial Sequence
  source: /note="Description of Artificial Sequence: Synthetic single chain variable fragment"
MGWSYIILFLVATATGVHSQVQLQQSGAELARPGASVKMSCKASGYTFTRYTMHWVKQRPGQGLEWIGYINPSRGYTNYNQKFKDKATLTTDKSSSTAYMQLSSLTSEDSAVYYCARYYDDHYSLDYWGQGTTLTVSSGGGGSGGGGSGGGGSQIVLTQSPAIMSASPGEKVTMTCSASSSVSYMNWYQQKSGTSPKRWIYDTSKLASGVPAHFRGSGSGTSYSLTISGMEAEDAATYYCQQWSSNPFTFGSGTKLEIKGGGGSGGGGSGGGGSQEDERIVLVDNKCKCARITSRIIRSSEDPNEDIVERNIRIIVPLNNRENISDPTSPLRTRFVYHLSDLCKKCDPTEVELDNQIVTATQSNICDEDSATETCYTYDRNKCYTAVVPLVYGGETKMVETALTPDACYPDGGGSEQKLISEEDLNSAVDHHHHHH

SEQ ID NO: 5929 - protein, 439 aa, Artificial Sequence
  source: /note="Description of Artificial Sequence: Synthetic single chain variable fragment"
MKNHLLFWGVLAVFIKAVHVKAQEDERIVLVDNKCKCARITSRIIRSSEDPNEDIVERNIRIIVPLNNRENISDPTSPLRTRFVYHLSDLCKKCDPTEVELDNQIVTATQSNICDEDSATETCYTYDRNKCYTAVVPLVYGGETKMVETALTPDACYPDGGGGSGGGGSGGGGSQVQLQQSGAELARPGASVKMSCKASGYTFTRYTMHWVKQRPGQGLEWIGYINPSRGYTNYNQKFKDKATLTTDKSSSTAYMQLSSLTSEDSAVYYCARYYDDHYSLDYWGQGTTLTVSSGGGGSGGGGSGGGGSQIVLTQSPAIMSASPGEKVTMTCSASSSVSYMNWYQQKSGTSPKRWIYDTSKLASGVPAHFRGSGSGTSYSLTISGMEAEDAATYYCQQWSSNPFTFGSGTKLEIKGGGSEQKLISEEDLNSAVDHHHHHH

SEQ ID NO: 5930 - protein, 246 aa, Artificial Sequence
  source: /note="Description of Artificial Sequence: Synthetic single chain variable fragment"
LLHESGAEVAKPGASVKMSCKASGYTFTTYWMHWIKQRPGQGLEWIGYINPSTGYTDYNQNFKDKATLTADKSSRTAYMQLSSLTSEDSTVYYCTRRGPSYGNHGAWFPYWGQGTLVTVSAVSSGGGGSGGGGSGGGGSTNIVMTQSPRSMSMSVGERVTLSCKASENVDTYVSWYQQKPEQSPKLLIYGASNRYTGVPDRFTGSGSATDFTLTISSVQAEDLADYHCGQSYRYPPTFGGGTKLEI

SEQ ID NO: 5931 - protein, 252 aa, Artificial Sequence
  source: /note="Description of Artificial Sequence: Synthetic single chain variable fragment"
RMAQVQLQQSGAELARPGASVKMSCKASGYTFTTYTIHWVRRRPGHDLEWIGYINPSSGCSDYNQNFKGKTTLTADKSSNTAYMQLNSLTSEDSAVYYCARRADYGNYEYTWFAYWGQGTTVTVSSSGGGSGGGGSGGGGSVIELTQSPKFMSTSVGDRVNVTYKASQNVGTNVAWFQQKPGQSPKVLIYSASYRYSGVPDRFTGSGSGTDFTLTISNVQSEDLAEYFCQQYHTYPLTFGGGTKLEIKRSDP

SEQ ID NO: 5932 - protein, 250 aa, Artificial Sequence
  source: /note="Description of Artificial Sequence: Synthetic single chain variable fragment"
QVQLVQSGAEVKKPGESLKISCKGSGYSFTSYWIGWVRQMPGKGLEWMGIIYPGDSDTRYSPSFQGQVTISADKSISTAYLQWSSLKASDTAMYYCARLGGSLPDYGMDVWGQGTMVTVSSASGGGGSGGGGSGGGGSEIVLTQSPLSLPVTPGEPASISCRSSQSLLHSNGYNYLDWYLQKPGQSPQLLIYLGSNRASGVPDRFSGSGSGTDFTLKISRVEAEDVGVYYCMQALQTLITFGQGTKVDIK

SEQ ID NO: 5933 - protein, 251 aa, Artificial Sequence
  source: /note="Description of Artificial Sequence: Synthetic single chain variable fragment"
QVQLVQSGAEVKKPGASVRVSCKASGYIFTNYYVHWVRQAPGQGLEWMGIISPSGGSPTYAQRLQGRVTMTRDLSTSTVYMELSSLTSEDTAVYFCARESRLRGNRLGLQSSIFDHWGQGTLVTVSSASGGGGSGGGGSGGGGSDIRMTQSPPSLSASVGDRVTIPCQASQDINNHLNWYQQKPGKAPQLLIYDTSNLEIGVPSRFSGSGSGTDFTLTISSLQPEDIATYYCQQYENLPLTFGGGTKVEIK

SEQ ID NO: 5934 - protein, 250 aa, Artificial Sequence
  source: /note="Description of Artificial Sequence: Synthetic single chain variable fragment"
QVQLVQSGAEVKKPGESLKISCKGSGYSFTSYWIGWVRQMPGKGLEWMGIIYPGDSDTRYSPSFQGQVTISADKSITTAYLQWSSLRASDSAMYYCARGGYSDYDYYFDFWGQGTLVTVSSASGGGGSGGGGSGGGGSEIVMTQSPLSLPVTPGEPASISCRSSQSLLHSNGYNYLDWYLQKPGQSPQLLIYLGSNRASGVPDRFSGSGSGTDFTLKISRVEAEDVGVYYCMQALQTPFTFGGGTKVEIK

SEQ ID NO: 5935 - protein, 240 aa, Artificial Sequence
  source: /note="Description of Artificial Sequence: Synthetic single chain variable fragment"
QVQLVQSGGDLAQPGRSLRLSCAASGFTFDDYAMHWVRQAPGKGLEWVAVIWPDGGQKYYGDSVKGRFTVSRDNPKNTLYLQMNSLRAEDTAIYYCVRHFNAWDYWGQGTLVTVSSASGGGGSGGGGSGGGGSDIQLTQSPSSLSAYVGGRVTITCQASQGISQFLNWFQQKPGKAPKLLISDASNLEPGVPSRFSGSGSGTDFTFTITNLQPEDIATYYCQQYDDLPLTFGGGTKVEIK

SEQ ID NO: 5936 - protein, 248 aa, Artificial Sequence
  source: /note="Description of Artificial Sequence: Synthetic single chain variable fragment"
QVQLVQSGGGVVQPGKSLRLSCAASGFTFSIFAMHWVRQAPGKGLEWVATISYDGSNAFYADSVEGRFTISRDNSKDSLYLQMDSLRPEDTAVYYCVKAGDGGYDVFDSWGQGTLVTVSSASGGGGSGGGGSGGGGSEIVMTQSPLSLPVTPGEPASISCRSSQSLLHSNGYNYLDWYLQKPGQSPQLLIYLGSNRASGVPDRFSGSGSGTDFTLKISRVEAEDVGVYYCMQALQTPTFGPGTKVDIK

SEQ ID NO: 5937 - protein, 245 aa, Artificial Sequence
  source: /note="Description of Artificial Sequence: Synthetic single chain variable fragment"
EVQLVESGGGLVQPGGSLRLSCAASGFTFSSYAMSWVRQAPGKGLEWVSAISGSGGSTYYADSVKGRFTISRDNSKNTLYLQMNSLRAEDTAVYYCAKETDYYGSGTFDYWGQGTLVTVSSASGGGGSGGGGSGGGGSDIQMTQSPSSLSASVGDRVTISCRASQGIGIYLAWYQQRSGKPPQLLIHGASTLQSGVPSRFSGSGSGTDFTLTISSLQPEDFASYWCQQSNNFPPTFGQGTKVEIK

SEQ ID NO: 5938 - protein, 244 aa, Artificial Sequence
  source: /note="Description of Artificial Sequence: Synthetic single chain variable fragment"
QVQLVQSGAEVKKPGESLKISCKGSGYSFTNYWIGWVRQMPGKGLEWMGIIYPGDSDTRYSPSFQGQVTISADKSISTAYLQWSSLKASDTAMYYCARHGPSSWGEFDYWGQGTLVTVSSASGGGGSGGGGSGGGGSDIRLTQSPSSLSASVGDRVTITCRASQSISSYLNWYQQKPGKAPKLLIYAASSLQSGVPSRFSGSGSGTDFTLTISSLQPEDFATYYCQQSYSTPLTFGGGTKVDIK

SEQ ID NO: 5939 - protein, 267 aa, Artificial Sequence
  source: /note="Description of Artificial Sequence: Synthetic single chain variable fragment"
MALPVTALLLPLALLLHAARPEVQLQQSGPELVKPGASVKISCKASGYTFTDYNMHWVKQSHGKSLEWIGYIYPYNGGTGYNQKFKSKATLTVDNSSSTAYMDVRSLTSEDSAVYYCARGRPAMDYWGQGTSVTVSSGGGGSGGGGSGGGGSDIVLTQSPASLAVSLGQRATISCRASESVDNYGISFMNWFQQKPGQPPKLLIYAASNQGSGVPARFSGSGSGTDFSLNIHPMEEDDTAMYFCQQSKEVPWTFGGGTKLEIKRSDP

SEQ ID NO: 5940 - protein, 271 aa, Artificial Sequence
  source: /note="Description of Artificial Sequence: Synthetic single chain variable fragment"
MALPVTALLLPLALLLHAARPQVQLVQSGAEVKKPGESLKISCKGSGYSFTSYWIGWVRQMPGKGLEWMGIIYPGDSDTRYSPSFQGQVTISADKSISTAYLQWSSLKASDTAMYYCARLGGSLPDYGMDVWGQGTMVTVSSASGGGGSGGGGSGGGGSEIVLTQSPLSLPVTPGEPASISCRSSQSLLHSNGYNYLDWYLQKPGQSPQLLIYLGSNRASGVPDRFSGSGSGTDFTLKISRVEAEDVGVYYCMQALQTLITFGQGTKVDIK

SEQ ID NO: 5941 - protein, 272 aa, Artificial Sequence
  source: /note="Description of Artificial Sequence: Synthetic single chain variable fragment"
MALPVTALLLPLALLLHAARPQVQLVQSGAEVKKPGASVRVSCKASGYIFTNYYVHWVRQAPGQGLEWMGIISPSGGSPTYAQRLQGRVTMTRDLSTSTVYMELSSLTSEDTAVYFCARESRLRGNRLGLQSSIFDHWGQGTLVTVSSASGGGGSGGGGSGGGGSDIRMTQSPPSLSASVGDRVTIPCQASQDINNHLNWYQQKPGKAPQLLIYDTSNLEIGVPSRFSGSGSGTDFTLTISSLQPEDIATYYCQQYENLPLTFGGGTKVEIK

SEQ ID NO: 5942 - protein, 270 aa, Artificial Sequence
  source: /note="Description of Artificial Sequence: Synthetic single chain variable fragment"
MALPVTALLLPLALLLHAARPQVQLVQSGGGLVQPGGSLRLSCAASGFTFSSYAMSWVRQAPGKGLEWVSAISGSGGSTYYADSVKGRFTISRDNSKNTLYLQMNSLRAEDTAVYYCAKEDTIRGPNYYYYGMDVWGQGTTVTVSSASGGGGSGGGGSGGGGSETTLTQSPSSVSASVGDRVSITCRASQDIDTWLAWYQLKPGKAPKLLMYAASNLQGGVPSRFSGSGSGTDFILTISSLQPEDFATYYCQQASIFPPTFGGGTKVDIK

SEQ ID NO: 5943 - protein, 271 aa, Artificial Sequence
  source: /note="Description of Artificial Sequence: Synthetic single chain variable fragment"
MALPVTALLLPLALLLHAARPQVQLVQSGAEVKKPGESLKISCKGSGYSFTSYWIGWVRQMPGKGLEWMGIIYPGDSDTRYSPSFQGQVTISADKSITTAYLQWSSLRASDSAMYYCARGGYSDYDYYFDFWGQGTLVTVSSASGGGGSGGGGSGGGGSEIVMTQSPLSLPVTPGEPASISCRSSQSLLHSNGYNYLDWYLQKPGQSPQLLIYLGSNRASGVPDRFSGSGSGTDFTLKISRVEAEDVGVYYCMQALQTPFTFGGGTKVEIK

SEQ ID NO: 5944 - protein, 261 aa, Artificial Sequence
  source: /note="Description of Artificial Sequence: Synthetic single chain variable fragment"
MALPVTALLLPLALLLHAARPQVQLVQSGGDLAQPGRSLRLSCAASGFTFDDYAMHWVRQAPGKGLEWVAVIWPDGGQKYYGDSVKGRFTVSRDNPKNTLYLQMNSLRAEDTAIYYCVRHFNAWDYWGQGTLVTVSSASGGGGSGGGGSGGGGSDIQLTQSPSSLSAYVGGRVTITCQASQGISQFLNWFQQKPGKAPKLLISDASNLEPGVPSRFSGSGSGTDFTFTITNLQPEDIATYYCQQYDDLPLTFGGGTKVEIK

SEQ ID NO: 5945 - protein, 269 aa, Artificial Sequence
  source: /note="Description of Artificial Sequence: Synthetic single chain variable fragment"
MALPVTALLLPLALLLHAARPQVQLVQSGGGVVQPGKSLRLSCAASGFTFSIFAMHWVRQAPGKGLEWVATISYDGSNAFYADSVEGRFTISRDNSKDSLYLQMDSLRPEDTAVYYCVKAGDGGYDVFDSWGQGTLVTVSSASGGGGSGGGGSGGGGSEIVMTQSPLSLPVTPGEPASISCRSSQSLLHSNGYNYLDWYLQKPGQSPQLLIYLGSNRASGVPDRFSGSGSGTDFTLKISRVEAEDVGVYYCMQALQTPTFGPGTKVDIK

SEQ ID NO: 5946 - protein, 266 aa, Artificial Sequence
  source: /note="Description of Artificial Sequence: Synthetic single chain variable fragment"
MALPVTALLLPLALLLHAARPEVQLVESGGGLVQPGGSLRLSCAASGFTFSSYAMSWVRQAPGKGLEWVSAISGSGGSTYYADSVKGRFTISRDNSKNTLYLQMNSLRAEDTAVYYCAKETDYYGSGTFDYWGQGTLVTVSSASGGGGSGGGGSGGGGSDIQMTQSPSSLSASVGDRVTISCRASQGIGIYLAWYQQRSGKPPQLLIHGASTLQSGVPSRFSGSGSGTDFTLTISSLQPEDFASYWCQQSNNFPPTFGQGTKVEIK

SEQ ID NO: 5947 - protein, 266 aa, Artificial Sequence
  source: /note="Description of Artificial Sequence: Synthetic single chain variable fragment"
MALPVTALLLPLALLLHAARPQVQLVQSGAEVKKPGASVRVSCKASGYMFTDFFIHWVRQAPGQGLEWMGWINPNSGVTKYAQKFQGRVTMTRNTSISTAYMELSSLRSEDTAVYYCATWYSSGWYGIANIWGQGTMVTVSSASGGGGSGGGGSGGGGSDIQLTQSPSSLSASVGDRVTITCQASHDISNYLHWYQQKPGKAPKLLIYDASNLETGVPSRFTGSGSGTDFTLTIRSLQPEDVAAYYCQQSDDLPHTFGQGTKVDIK

SEQ ID NO: 5948 - protein, 265 aa, Artificial Sequence
  source: /note="Description of Artificial Sequence: Synthetic single chain variable fragment"
MALPVTALLLPLALLLHAARPQVQLVQSGAEVKKPGESLKISCKGSGYSFTNYWIGWVRQMPGKGLEWMGIIYPGDSDTRYSPSFQGQVTISADKSISTAYLQWSSLKASDTAMYYCARHGPSSWGEFDYWGQGTLVTVSSASGGGGSGGGGSGGGGSDIRLTQSPSSLSASVGDRVTITCRASQSISSYLNWYQQKPGKAPKLLIYAASSLQSGVPSRFSGSGSGTDFTLTISSLQPEDFATYYCQQSYSTPLTFGGGTKVDIK

SEQ ID NO: 5949 - protein, 267 aa, Artificial Sequence; identical to SEQ ID NO: 5939
  source: /note="Description of Artificial Sequence: Synthetic single chain variable fragment"

SEQ ID NO: 5950 - protein, 250 aa, Artificial Sequence; identical to SEQ ID NO: 5932
  source: /note="Description of Artificial Sequence: Synthetic single chain variable fragment"

SEQ ID NO: 5951 - protein, 251 aa, Artificial Sequence; identical to SEQ ID NO: 5933
  source: /note="Description of Artificial Sequence: Synthetic single chain variable fragment"

SEQ ID NO: 5952 - protein, 249 aa, Artificial Sequence
  source: /note="Description of Artificial Sequence: Synthetic single chain variable fragment"
QVQLVQSGGGLVQPGGSLRLSCAASGFTFSSYAMSWVRQAPGKGLEWVSAISGSGGSTYYADSVKGRFTISRDNSKNTLYLQMNSLRAEDTAVYYCAKEDTIRGPNYYYYGMDVWGQGTTVTVSSASGGGGSGGGGSGGGGSETTLTQSPSSVSASVGDRVSITCRASQDIDTWLAWYQLKPGKAPKLLMYAASNLQGGVPSRFSGSGSGTDFILTISSLQPEDFATYYCQQASIFPPTFGGGTKVDIK

SEQ ID NO: 5953 - protein, 250 aa, Artificial Sequence; identical to SEQ ID NO: 5934
  source: /note="Description of Artificial Sequence: Synthetic single chain variable fragment"

SEQ ID NO: 5954 - protein, 240 aa, Artificial Sequence; identical to SEQ ID NO: 5935
  source: /note="Description of Artificial Sequence: Synthetic single chain variable fragment"

SEQ ID NO: 5955 - protein, 248 aa, Artificial Sequence; identical to SEQ ID NO: 5936
  source: /note="Description of Artificial Sequence: Synthetic single chain variable fragment"

SEQ ID NO: 5956 - protein, 245 aa, Artificial Sequence; identical to SEQ ID NO: 5937
  source: /note="Description of Artificial Sequence: Synthetic single chain variable fragment"

SEQ ID NO: 5957 - protein, 245 aa, Artificial Sequence
  source: /note="Description of Artificial Sequence: Synthetic single chain variable fragment"
QVQLVQSGAEVKKPGASVRVSCKASGYMFTDFFIHWVRQAPGQGLEWMGWINPNSGVTKYAQKFQGRVTMTRNTSISTAYMELSSLRSEDTAVYYCATWYSSGWYGIANIWGQGTMVTVSSASGGGGSGGGGSGGGGSDIQLTQSPSSLSASVGDRVTITCQASHDISNYLHWYQQKPGKAPKLLIYDASNLETGVPSRFTGSGSGTDFTLTIRSLQPEDVAAYYCQQSDDLPHTFGQGTKVDIK

SEQ ID NO: 5958 - protein, 244 aa, Artificial Sequence; identical to SEQ ID NO: 5938
  source: /note="Description of Artificial Sequence: Synthetic single chain variable fragment"

SEQ ID NO: 5959 - protein, 246 aa, Artificial Sequence
  source: /note="Description of Artificial Sequence: Synthetic single chain variable fragment"
NIMLTQSPSSLAVSAGEKVTMSCKSSQSVFFSSSQKNYLAWYQQIPGQSPKLLIYWASTRESGVPDRFTGSGSGTDFTLTISSVQSEDLAIYYCHQYLSSRTFGGGTKLEIKRGGGGSGGGGSSGGGSQVQLQQPGAEVVKPGASVKMSCKASGYTFTSYYIHWIKQTPGQGLEWVGVIYPGNDDISYNQKFKGKATLTADKSSTTAYMQLSSLTSEDSAVYYCAREVRLRYFDVWGAGTTVTVSS

SEQ ID NO: 5960 - protein, 246 aa, Artificial Sequence
  source: /note="Description of Artificial Sequence: Synthetic single chain variable fragment"
EIVLTQSPGSLAVSPGERVTMSCKSSQSVFFSSSQKNYLAWYQQIPGQSPRLLIYWASTRESGVPDRFTGSGSGTDFTLTISSVQPEDLAIYYCHQYLSSRTFGQGTKLEIKRGGGGSGGGGSSGGGSQVQLQQPGAEVVKPGASVKMSCKASGYTFTSYYIHWIKQTPGQGLEWVGVIYPGNDDISYNQKFQGKATLTADKSSTTAYMQLSSLTSEDSAVYYCAREVRLRYFDVWGQGTTVTVSS

SEQ ID NO: 5961 - protein, 511 aa, Artificial Sequence
  source: /note="Description of Artificial Sequence: Synthetic single chain variable fragment"
QVQLVQSGAEVKKPGESVKVSCKASGYTFTNYGMNWVKQAPGQGLEWMGWINTYTGEPTYADKFQGRVTMTTDTSTSTAYMEIRNLGGDDTAVYYCARWSWSDGYYVYFDYWGQGTSVTVSSGGGGSGGGGSGGGGSDIVMTQSPDSLTVSLGERTTINCKSSQSVLDSSTNKNSLAWYQQKPGQPPKLLLSWASTRESGIPDRFSGSGSGTDFTLTIDSPQPEDSATYYCQQSAHFPITFGQGTRLEIKSGGGGSEVQLVESGGGLVQPGGSLKLSCAASGFTFNKYAMNWVRQAPGKGLEWVARIRSKYNNYATYYADSVKDRFTISRDDSKNTAYLQMNNLKTEDTAVYYCVRHGNFGNSYISYWAYWGQGTLVTVSSGGGGSGGGGSGGGGSQTVVTQEPSLTVSPGGTVTLTCGSSTGAVTSGNYPNWVQQKPGQAPRGLIGGTKFLAPGTPARFSGSLLGGKAALTLSGVQPEDEAEYYCVLWYSNRWVFGGGTKLTVLHHHHHH

SEQ ID NO: 5962 - protein, 728 aa, Artificial Sequence
  source: /note="Description of Artificial Sequence: Synthetic single chain variable fragment"
QVQLVQSGAEVKKPGESVKVSCKASGYTFTNYGMNWVKQAPGQGLEWMGWINTYTGEPTYADKFQGRVTMTTDTSTSTAYMEIRNLGGDDTAVYYCARWSWSDGYYVYFDYWGQGTSVTVSSGGGGSGGGGSGGGGSDIVMTQSPDSLTVSLGERTTINCKSSQSVLDSSTNKNSLAWYQQKPGQPPKLLLSWASTRESGIPDRFSGSGSGTDFTLTIDSPQPEDSATYYCQQSAHFPITFGQGTRLEIKSGGGGSEVQLVESGGGLVQPGGSLKLSCAASGFTFNKYAMNWVRQAPGKGLEWVARIRSKYNNYATYYADSVKDRFTISRDDSKNTAYLQMNNLKTEDTAVYYCVRHGNFGNSYISYWAYWGQGTLVTVSSGGGGSGGGGSGGGGSQTVVTQEPSLTVSPGGTVTLTCGSSTGAVTSGNYPNWVQQKPGQAPRGLIGGTKFLAPGTPARFSGSLLGGKAALTLSGVQPEDEAEYYCVLWYSNRWVFGGGTKLTVLAPELLGGPSVFLFPPKPKDTLMISRTPEVTCVVVDVSHEDPEVKFNWYVDGVEVHNAKTKPREEQYGSTYRVVSVLTVLHQDWLNGKEYKCKVSNKALPAPIEKTISKAKGQPREPQVTTLPPSREEMTKNQVSLTCLVKGFYPSDIAVEWESNGQPENNYDTTPPVLDSDGSFFLYSDLTVDKSRWQQGNVFSCSVMHEALHNHYTQKSLSLSPGKHHHHHH

SEQ ID NO: 5963 - protein, 728 aa, Artificial Sequence
  source: /note="Description of Artificial Sequence: Synthetic single chain variable fragment"
QVQLVQSGAEVKKPGESVKVSCKASGYTFTNYGMNWVKQAPGQGLEWMGWINTYTGEPTYADKFQGRVTMTTDTSTSTAYMEIRNLGGDDTAVYYCARWSWSDGYYVYFDYWGQGTSVTVSSGGGGSGGGGSGGGGSDIVMTQSPDSLTVSLGERTTINCKSSQSVLDSSTNKNSLAWYQQKPGQPPKLLLSWASTRESGIPDRFSGSGSGTDFTLTIDSPQPEDSATYYCQQSAHFPITFGQGTRLEIKSGGGGSEVQLVESGGGLVQPGGSLKLSCAASGFTFNKYAMNWVRQAPGKGLEWVARIRSKYNNYATYYADSVKDRFTISRDDSKNTAYLQMNNLKTEDTAVYYCVRHGNFGNSYISYWAYWGQGTLVTVSSGGGGSGGGGSGGGGSQTVVTQEPSLTVSPGGTVTLTCGSSTGAVTSGNYPNWVQQKPGQAPRGLIGGTKFLAPGTPARFSGSLLGGKAALTLSGVQPEDEAEYYCVLWYSNRWVFGGGTKLTVLAPELLGGPSVFLFPPKPKDTLMISRTPEVTCVVVDVSHEDPEVKFNWYVDGVEVHNAKTKPREEQYNSTYRVVSVLTVLHQDWLNGKEYKCKVSNKALPAPIEKTISKAKGQPREPQVTTLPPSREEMTKNQVSLTCLVKGFYPSDIAVEWESNGQPENNYDTTPPVLDSDGSFFLYSDLTVDKSRWQQGNVFSCSVMHEALHNHYTQKSLSLSPGKHHHHHH

SEQ ID NO: 5964 - protein, 214 aa, Artificial Sequence
  source: /note="Description of Artificial Sequence: Synthetic single chain variable fragment"
DIQMTQSPSSLSVSVGERVTITCRASENIRSNLAWYQQKPGKSPKLLVNVATNLADGVPSRFSGSGSGTDYSLKINSLQPEDFGTYYCQHYWGTTWTFGQGTKLEIKRTVAAPSVFIFPPSDEQLKSGTASVVCLLNNFYPREAKVQWKVDNALQSGNSQESVTEQDSKDSTYSLSSTLTLSKADYEKHKVYACEVTHQGLSSPVTKSFNRGEC

SEQ ID NO: 5965 - protein, 115 aa, Artificial Sequence
  source: /note="Description of Artificial Sequence: Synthetic single chain variable fragment"
QVQVQESGPGLVAPSQTLSITCTVSGFSLTTSGVSWVRQPPGKGLEWLGVIWGDGSTNYHSSLKSRLSIKKDHSKSQVFLKLNSLTAADTATYYCAKGGYSLAHWGQGTLVTVSS

SEQ ID NO: 5966 - protein, 68 aa, Artificial Sequence
  source: /note="Description of Artificial Sequence: Synthetic single chain variable fragment"
FWVLVVVGGVLACYSLLVTVAFIIFWVRSKRSRLLHSDYMNMTPRRPGPTRKHYQPYAPPRDFAAYRS

SEQ ID NO: 5967 - protein, 242 aa, Artificial Sequence
  source: /note="Description of Artificial Sequence: Synthetic single chain variable fragment"
QVQLQESGGGLVKPGGPLRLSCAASGFTFSSYGMYWVRQAPGKGLEWVSTLSRSGSGTYYADSVKGRFTISRBNSKNTLYLQMNSLRAEDTAVYYCASIAVAGNYFDYWGQGTLVTVSSGGGGSGGGGSGGGGSSYVLTQDPAVSVALGQTVRITCQGDSLRSYYASWYQERPGQAPLLVIYGKNNRPSGIPDRFSGSNSGSTATLTISRVEAGDEGDYYCQVWDSINEQVVFGGGTKVTVL

SEQ ID NO: 5968 - protein, 241 aa, Artificial Sequence
  source: /note="Description of Artificial Sequence: Synthetic single chain variable fragment"
QVQLVQSGGGVVQPGRSLRLSCAATGIPFSGSGMHWVRQAPGKGLEWVTMIWYDGSNKFYADSVKGRFTISRDNSKNTLYLQMDSLRAEDTAVYFCARDKGVRSMDVWGLGTTVTVSSGGGGSGGGGSGGGGSNFMLTQPPSVSVAPGQTAKITCDGYSIRTKSVHWYQQKPGQAPVVVVHDDSDRPSGIPERFSGSNSGTTATLTISRVEAGDEADYYCQAWDSISEEVVFGGGTKLTVL

SEQ ID NO: 5969 - protein, 239 aa, Artificial Sequence
  source: /note="Description of Artificial Sequence: Synthetic single chain variable fragment"
QVQLQESGGGLVQPGGSLRLSCSASGFTFGTYAMRWVRQTSGKGLEWVSGIGVSGDAYYTDSVRGRFTISRDNSKNTLYLQMNTLRAEDTAYYCTRKSSTTSNDYWGRGTLVTVSSGGGGSGGGGSGGGGSSYVLTQDPAVSVALGQTVRITCQGDNIGSKSVHWYQQKPGQAPVLVVYDDSDRPSGIPERFSGSNSGTTATLTISSVEAGDEADYYCQAWDSISEHVIFGGGTKVTVL

SEQ ID NO: 5970 - protein, 238 aa, Artificial Sequence
  source: /note="Description of Artificial Sequence: Synthetic single chain variable fragment"
QVQLQESGGGLVQPGGSLRLSCAASGTFSSYAMHWVRQAPGKGLEWVAVISYDGSNKYYADSVKGRFTISRDNSKNTLYLQMNSLRAEDTAVYYCARFSSGWYYFDYWGQGTLVTVSSGGGGSGGGGSGGGGSDIQMTQSPSFLSASVGDRITITCRASNDISSYFAWYQQKPGKAPKPLIYAASTLQSGVPSRFSGSGTEFTLTISSLQPEDFATYYCQQLGSYPLTFGGGTKLEIK

SEQ ID NO: 5971 - protein, 245 aa, Artificial Sequence
  source: /note="Description of Artificial Sequence: Synthetic single chain variable fragment"
QVQLLQSGGGLVQPGGSLRLSCAASGFTFSSYAMSWVRQAPGKGLEWVSAISGSGGSTYYTDSVKGRFTISRDNSKNTLYLQMNSLRAEDTAVYYCAKSHDYGDYAGFDYWGQGTLVTVSSGGGGSGGGGSGGGGSHVILTQDPAVSVALGQTVRITCQGDSLKSYYASWYQQKPGQAPVLVIYGKNNRPSGIPDRFSGSSSGTTASLTITGAQAEDEADYYCHSRDSSGTHLRVFGGGTKLTVL

SEQ ID NO: 5972 - protein, 244 aa, Artificial Sequence
  source: /note="Description of Artificial Sequence: Synthetic single chain variable fragment"
QVQLQESGGGLVKPGGSLRLSCAASGFTFSNAWMNWVRQAPGKGLEWVGRIKSKTDEGTTDYAAPVKGRFSISRDDSKNTLYLQMNSLKTEDTGVYYCTATKGLGGSKLGQGTLVTVSSGGGGSGGGGSGGGGSQSVLTQPPSASGTPGQRVTISCSGSSSNIGNNTVNWSRQLPGTAPKLLIYSNDQRPSGVPDRFSGSKSGTSASLAITGLQPEDEADYYCGTWDSSLSAYVFGTGTKLTVL

SEQ ID NO: 5973 - protein, 244 aa, Artificial Sequence
  source: /note="Description of Artificial Sequence: Synthetic single chain variable fragment"
QVQLVESGGGWQPGRSLRLSCAASGFTFSSFGMHWVRRAPGKGLEWVAVISYDGSNQYYADSVKGRFTISRDNSKNTLYLQMNSLRAEDTAVYYCGSRPGGGYASGSTVAYWGQGTPVTVSSGGGGSGGGGSGGGGSSSELTQDPAVSVALGQTVRITCQGDSLRSYYASWYQQKPGQAPLLVIYGQNIRPSGIPDRFSGSSSGNSASLTITGAQAEDEADYYCHSRDSSGKYVFGVGTKVTVL

SEQ ID NO: 5974 - protein, 237 aa, Artificial Sequence
  source: /note="Description of Artificial Sequence: Synthetic single chain variable fragment"
QVQLVESGGGLVQPGGSLRLSCAASGFTFSSYAMGWVRQAPGKGLEWVSAISGSGGSTYYADSVKGRFTISRDNSKDTLYLQMNSLRAEDTAVYYCASRSLLDYWGQGTLVTVSSGGGGSGGGGSGGGGSNFMLTQDPAVSVALGQTVRITCQGDSLRSYYASWYQQKPGQAPLLVIYGKNNRPSGIPDRFSGSSSGNTASLTITGAQAEDEADYYCNSRDSSGNPVFGGGTKVTVL

SEQ ID NO: 5975 - protein, 237 aa, Artificial Sequence
  source: /note="Description of Artificial Sequence: Synthetic single chain variable fragment"
QVQLVESGGGLVQPGGSLRLSCAASGFTFSSYAMSWVRQAPGKGLEWVSAISGSGGSTYYADSVKGRFTISRDNSKDTLYLQMNSLRAEDTAVYYCASRSLLDYWGQGTLVTVSSGGGGSGGGGSGGGGSNFMLTQDPAVSVALGQTVRITCQGDSLRSYYASWYQQKPGQAPLLVIYGKNNRPSGIPDRFSGSSSGNTASLTITGAQAEDEADYYCNSRDSSGNPVFGGGTKVTVL

SEQ ID NO: 5976 - protein, 243 aa, Artificial Sequence
  source: /note="Description of Artificial Sequence: Synthetic single chain variable fragment"
QVQLQESGGGLVQLGGSLRLSCAASGFTFSSYAMSWVRQAPGKGLEWVSAISGSGGSTYYADSVKGRFTISRDNSKNTLYLQMSSLRAEDTAFYYCANSAYTGGWYDYWGHGTLVTVSSGGGGSGGGGSGGGGSSSELTQDPAVSVALGQTVKITCQGDSLRTYYASWYQQRPGQAPVLVIYGENSRPSGIPDRFSGSSSGNTASLTITGAQAEDEADYYCNSRDSSGNHLRVFGGGTKLTVL

SEQ ID NO: 5977 - protein, 234 aa, Artificial Sequence
  source: /note="Description of Artificial Sequence: Synthetic single chain variable fragment"
QVNLRESGGGLVQPGGFLRLSCAAFGFTFSGYWMSWVHPAPGKGLEWVANIKQDGSEKFYVDSVKGRFTISRDNAKNSLFLQMNSLRAEDTAVYFCARGLLSDYWGQGTLVPVSSGGGGSGGGGSGGGGSNFMLTQPPSVSVAPGKTASLTCGGYNIGTKSVHWYQQKPGQAPWWHDDSDRPSGIPERFSGSNSGTTATLIIRVEAGDEADYYCQAWDSISEEWFGGGTKLTVL

SEQ ID NO: 5978 - protein, 241 aa, Artificial Sequence
  source: /note="Description of Artificial Sequence: Synthetic single chain variable fragment"
QVQLQESGGGLVKPGGPLRLSCAASGFTFSSYGMYWVRQAPGKGLEWVSTLSRSGSGTYYAESVKGRFTISRDNSKNTLYFQMNSLRAEDTAVYYCASIAVAGNYFEYWGQGTLVTVSSGGGGSGGGGSGGGGSSYVLTQDPAVSVALGQTVRITCQGDSLRSYYASWYQERPGQAPLLVIYGKNNRPSGIPDRFSGSNSGSTATLTISRVEAGDEGDYYCQVWDSINEQWFGGGTKVTVL

SEQ ID NO: 5979 - protein, 241 aa, Artificial Sequence
  source: /note="Description of Artificial Sequence: Synthetic single chain variable fragment"
QVQLQESGGGLVKPGESLRLSCAASGFTFSDHYMDWVRQAPGKGLEWVAYIRYDGSTKYYADSVKGRFTISRDNSKNTLYLQMNSLRPEDTAFYYCARLIAEAEGWFDPWGQGTLVTVSSGGGGSGGGGSGGGGSNFMLTQPPSVSVAPGKTARITCGGNNIGSKSVYWYQQKPGQAPVLWYDDSDRPSGIPERFSGSNSGNTATLTISRVEAGDEADYYCQVWDSSSDHWFGGGTKVTVL

SEQ ID NO: 5980 - protein, 240 aa, Artificial Sequence
  source: /note="Description of Artificial Sequence: Synthetic single chain variable fragment"
QVQLLQSAGGLVQPGGSLRLSCAASGFTFSTYAMNWVRQAPGKGLEWVSGISGSGGSTNYADSVKGRFTISRDSSKNTLFLQMNSLRAEDTAVYYCAKDYGSGWYDYWGQGTLVTVSSGGGGSGGGGSGGGGSSSELTQDPAVSVALGQTVRITCQGDSLRSYYASWYQERPGQAPLLVIYGRNERPSGIPDRFSASSSGNTASLTITGAQAEDEADYYCQVWDSFNEQWFGGGTKLTVL

SEQ ID NO: 5981 - protein, 245 aa, Artificial Sequence
  source: /note="Description of Artificial Sequence: Synthetic single chain variable fragment"
QVQLVESGGGLVQPGGSLRLSCAASGFTFSSYAMSWVHQAPGKGLEWVSAISGSGGSTYYADSVKGRFTISRDNSKNTLYLQMNSLRAEDTAVYYCAKTYYGFWSGYYDYLGQGTLVTVSSGGGGSGGGGSGGGGSSSELTQDPAVSVGLGQTVTITCQGDSLRSYYANWYQQKPGQAPILVIYGENNRPSGIPDRFSGSSSGNTASLTITGAQAEDEADYYCHSRDSSGTHLRVFGGGTKLTVL

SEQ ID NO: 5982 - protein, 243 aa, Artificial Sequence
  source: /note="Description of Artificial Sequence: Synthetic single chain variable fragment"
QVQLLESGGGWQPGTSLRLSCAASGFTFSNYAINWVRQAAGKGLEWVSGISGSGVSTSYADSVKGRFTVSRDNSKNTLYLQMNSLRVEDTALYYCAKNGGGPEYLQHWGQGTLVTVSSGGGGSGGGGSGGGGSQSVLTQPPSASGTPGQRVTISCSGSSSNIGNNTVNWSRQLPGTAPKLLIYSNDQRPSGVPDRFSGSKSGTSASLAITGLQPEDEADYYCGTWDSSLSAYVFGTGTKLTVL

SEQ ID NO: 5983 - protein, 235 aa, Artificial Sequence
  source: /note="Description of Artificial Sequence: Synthetic single chain variable fragment"
QVQLQESGGTLVQPGGSLRLSCAASGFTFSSYAMSWVRQAPGRGLEWVSTISGSGGSTYYADSVKGRFTISRDNSKNTLYLQMNSLRAEDTAVYYCAKGAYSGSYWGQGTLVTVSSGGGGSGGGGSGGGGSSSELTQDPAVSVALGQTVRITCQGDSLRSYYASWYQQKPGQAPSLVIYGENSRPSGIPDRFSGSSSGNTASLIGAQAENEADYYCQAWDSSTAWFGGGTKLTVL

SEQ ID NO: 5984 - protein, 237 aa, Artificial Sequence
  source: /note="Description of Artificial Sequence: Synthetic single chain variable fragment"
QVQLQESGGTLVQPGGSLRLSCAASGFTFSSYAMSWVRQAPGRGLEWVSTISGSGGSTYYADSVKGRFTISRDNSKNTLYLQMNSLRAEDTAVYYCAKGAYSGSHWGQGTLVTVSSGGGGSGGGGSGGGGSSSELTQDPAVSVALGQTVRITCQGDSLRSYYASWYQQKPGQAPSLVIYGENSRPSGIPDRFSGSSSGNTASLTITGAQAENEADYYCQAWDSSTAWFGGGTKLTVL

SEQ ID NO: 5985 - protein, 244 aa, Artificial Sequence
  source: /note="Description of Artificial Sequence: Synthetic single chain variable fragment"
QVQLVESGAEVKKPGASVKVSCKASGYTFTSYGISWVRQAPGQGLEWMGWISAYNGNTNYAQKLQGRVTMTTDTSTSTAYMELRSLRSDDTAVYYCARPIYDSSGYDAFDIWGQGTMVTVSSGGGGSGGGGSGGGGSDIVMTQSPSTLSASIGDRVTITCRASEGIYHWLAWYQQKPGKAPKLLIYKASSLASGAPSRFSGSGSGTDFTLTISSLQPDDFATYYCQQYHTISRTFGPGTKVDIK

SEQ ID NO: 5986 - protein, 244 aa, Artificial Sequence
  source: /note="Description of Artificial Sequence: Synthetic single chain variable fragment"
QVQLVESGGGLVKPGGSLRLSCAASGFTFSSYAMHWVRQAPGKGLEWVAVISYDGSNKYYADSVKGRFTISRDNSKNTLYLQMNSLRAEDTAVYFCVRPSDSGWSFEHWGQGTLVPVSSGGGGSGGGGSGGGGSQSVLTQPPSASGTPGQRVTISCSGSSSNIGNNTVNWSRQLPGTAPKLLIYSNDQRPSGVPDRFSGSKSGTSASLAITGLQPEDEADYYCGTWDSSLSAYVFGTGTKLTVL

SEQ ID NO: 5987 - protein, 245 aa, Artificial Sequence
  source: /note="Description of Artificial Sequence: Synthetic single chain variable fragment"
QVQLQESGGGLVQPGGSLRLSCAASGFTFSSYAMSWVRQAPGKGLEWVAVISYDGSNKYYADSVKGRFTISRDNSKNTLYLQMNSLRAEDTAVYYCVRGDRSYGAEYFQHWGQGTLVTVSSGGGGSGGGGSGGGGSSSELTQDPAVSVASGQTVRITCQGDSLRSYYASWYQQKPGQAPLLVIYGKNIRPSGIPDRFSGSTSGNSASLTITGAQAEDEADYYCNSRDSSGNRNWVFGGGTKLTVL

SEQ ID NO: 5988 - protein, 245 aa, Artificial Sequence
  source: /note="Description of Artificial Sequence: Synthetic single chain variable fragment"
QVQLQESGGGLVKPGGSLRLSCAASGFTSSSYAMHWVRQAPGKGLEYVSAIGGNGGTYYADSVKGRFTISRDNSKNTLYLQMNSLRAEDTAVYYCAKEGEQWLEYRYYYGMDVWGQGTTVTVSSGGGGSGGGGSGGGGSSSELTQDPAVSVALGQTVRITCQGDSLRSYYASWYQQKPGQAPSLVIYGENSRPSGIPDRFSGSSSGNTASLTITGAQAENEADYYCQAWDSSTAWFGGGTKLTVL

SEQ ID NO: 5989 - protein, 247 aa, Artificial Sequence
  source: /note="Description of Artificial Sequence: Synthetic single chain variable fragment"
QVQLVESGGGWQPGRSLRLSCTASGFTFSSYGMHWVRQAPGKGLEWVAVISYDGSNKYYADSVKGRFTISRDNSKNTLYLQMNSLRAEDTAVYYCARGGRYSSNWFSYYYYGMDVWGQGTTVTVSSGGGGSGGGGSGGGGSNFMLTQPPSVSVAPGKTARITCGGNNIGSKSVYWYQQKPGQAPVLWYDDSDRPSGIPERFSGSNSGNTATLTISRVEAGDEADYYCQVWDSSSDHWFGGGTKVTVL

SEQ ID NO: 5990 - protein, 324 aa, Artificial Sequence
  source: /note="Description of Artificial Sequence: Synthetic single chain variable fragment"
MALPVTALLLPLALLLHAARPDIQVTQSPSSLSASLGERISLTCRTSQDISNYLNWFQQKPDGTFKRLIYATSSLDSGVPKRFSGSGSGSDYSLTISSLESEDFADYYCLQYASYPFTFGSGTKLEIKGGGGSGGGGSGGGGSEVQLQESGPGLVKPSQTLSLTCSVTGYSITSGYYWHWIRQFPGNKLQWMGYISYSGFTNYKTSLINRISITHDTSENQFFLNLNSVTTEDTATYYCAGDRTGSWFAYWGQGTLVTVSATTTPAPRPPTPAPTIASQPLSLRPEACRPAAGGAVHTRGDFACDIYIWAPLAGTLSLVITLYC

SEQ ID NO: 5991 - protein, 252 aa, Artificial Sequence
  source: /note="Description of Artificial Sequence: Synthetic single chain variable fragment"
DIVLTQSPASLAVSLGQRATISCKASQSVDYDGDGYMDWYQQKPGQPPKLLIFAASNLKSGIPARFSGSGSGTDFTLNIHPVEEEDAATYYCQQTNEYPWTFGGGTKLEIKGSTSGSGKPGSGEGSTKGQIQLVQSGPELKKPGETVKISCKASGYTFTDYSMHWVKQAPGEGLKWMGWINTETGEPTYADDFKGRFAFSLETSASTAYLQINNLKNEDTATYFCYYGSYWGQGTLVTVSAGGGGSGGGGSC

SEQ ID NO: 5992 - protein, 213 aa, Artificial Sequence
  source: /note="Description of Artificial Sequence: Synthetic single chain variable fragment"
DIQLTQSPSSLSASVGDRVTITCKASQDVGTSVAWYQQKPGKAPKLLIYWTSTRHTGVPSRFSGSGSGTDFTFTISSLQPEDIATYYCQQYSLYRSFGQGTKVEIKRTVAAPSVFIFPPSDEQLKSGTASVVCLLNNFYPREAKVQWKVDNALQSGNSQESVTEQDSKDSTYSLSSTLTLSKADYEKHKVYACEVTHQGLSSPVTKSFNRGEC

SEQ ID NO: 5993 - protein, 257 aa, Artificial Sequence
  source: /note="Description of Artificial Sequence: Synthetic single chain variable fragment"
MSVPTQVLGLLLLWLTGARCDIQMTQSPASLSASVGDTVTITCRASENIYSYLAWYQQKQGKSPQLLVYNAKALSEGVPSRFSGSGSGTQFSLRINSLQPEDFGDYYCQHHYNSPYTFGGGTKLEIKGSTSGSGKSSEGKGQIQLVQSGPELKKPGETVKISCKASGYSFTNDGINWVKQAPGKGFKYMGWINTITGEPTYTEDFKGRFAFSLETSASTAYLQINNLKDEDTATFFCAKGTGTSAYWGQGTLVTVSA

SEQ ID NO: 5994 - protein, 257 aa, Artificial Sequence; identical to SEQ ID NO: 5993
  source: /note="Description of Artificial Sequence: Synthetic single chain variable fragment"

SEQ ID NO: 5995 - protein, 256 aa, Artificial Sequence
  source: /note="Description of Artificial Sequence: Synthetic single chain variable fragment"
DILLTQSPVILSVSPGERVSFSCRASQSIGTNIHWYQQRTNGSPRLLIKYASESISGIPSRFSGSGSGTDFTLSINSVESEDIADYYCQQNNNWPTTFGAGTKLELKRGSTSGSGKPGSGEGSTKGQVQLKQSGPGLVQPSQSLSITCTVSGFSLTNYGVHWVRQSPGKGLEWLGVIWSGGNTDYNTPFTSRLSINKDNSKSQVFFKMNSLQSNDTAIYYCARALTYYDYEFAYWGQGTLVTVSAGGGGSGGGGSC

SEQ ID NO: 5996 - protein, 256 aa, Artificial Sequence; identical to SEQ ID NO: 5995
  source: /note="Description of Artificial Sequence: Synthetic single chain variable fragment"

SEQ ID NO: 5997 - protein, 480 aa, Artificial Sequence
  source: /note="Description of Artificial Sequence: Synthetic single chain variable fragment"
MALPVTALLLPLALLLHAARPDIQMTQSPSSLSASVGDRVTITCKAGQNVGTSVAWFQQKPGKAPKSLIYSASYRYSGVPSRFSGSGSGTDFTLTISSLQPEDFATYYCQQYITYPYTFGGGTKVEIKGGGGSGGGGSGGGGSEVQLLESGGGLVQPGGSLRLSCAASGFTFSRYWMSWVRQAPGKGLEWVSEINPDSSTIQYTPSLKARFTISRDNSKNTLYLQMNSLRAEDTAVYYCTGPAYWGQGTLVTVSSSSTTTPAPRPPTPAPTIASQPLSLRPEACRPAAGGAVHTRGLDFACDIYIWAPLAGTCGVLLLSLVITLYCKRGRKKLLYIFKQPFMRPVQTTQEEDGCSCRFPEEEEGGCELRVKFSRSADAPAYKQGQNQLYNELNLGRREEYDVLDKRRGRDPEMGGKPRRKNPQEGLYNELQKDKMAEAYSEIGMKGERRRGKGHDGLYQGLSTATKDTYDALHMQALPPR

SEQ ID NO: 5998 - protein, 242 aa, Artificial Sequence
  source: /note="Description of Artificial Sequence: Synthetic single chain variable fragment"
SQVQLQQPGAELVRPGASVKLSCKASGYSFTTYWMNWVKQRPGQGLEWIGMIHPSDSETRLNQKFKDKATLTVDKSSSTAYMQLSSPTSEDSAVYYCARSTMIATRAMDYWGQGTSVTVSGGGGSGGGGSGGGGSDIVMTQSQKSMSTSVGDRVSITCKASQDVITGVAWYQQKPGQSPKLLIYSASYRYTGVPDRFTGSGSGTDFTFTISNVQAEDLAVYYCQQHYSTPLTFGAGTKLELK

SEQ ID NO: 5999 - protein, 249 aa, Artificial Sequence
  source: /note="Description of Artificial Sequence: Synthetic single chain variable fragment"
EIVLTQSPATLSLSPGERATLSCSVSSSISSSNLHWYQQKPGQAPRLLIYGTSNLASGIPARFSGSGSGTDFTLTISSLEPEDFAVYYCQQWSSYPHTFGGGTKVEIKGGGGSGGGGSGGGGSQVQLVQSGAEVKKPGASVKVSCKASGYTFTNYLIEWVRQAPGQGLEWMGLINPGSGGTNYNEKFKGRVTMTTDTSTSTAYMELRSLRSDDTAVYYCARRSPLGSWIYYAYDGVAYWGQGTLVTVSS

SEQ ID NO: 6000 - protein, 234 aa, Artificial Sequence
  source: /note="Description of Artificial Sequence: Synthetic single chain variable fragment"
DIQMTQSPSSLSASVGDRVTITCKAGQNVGTSVAWFQQKPGKAPKSLIYSASYRYSGVPSRFSGSGSGTDFTLTISSLQPEDFATYYCQQYITYPYTFGGGTKVEIKGGGGSGGGGSGGGGSEVQLLESGGGLVQPGGSLRLSCAASGFTFSRYWMSWVRQAPGKGLEWVSEINPDSSTIQYTPSLKARFTISRDNSKNTLYLQMNSLRAEDTAVYYCTGPAYWGQGTLVTVSS

SEQ ID NO: 6001 - protein, 493 aa, Artificial Sequence
  source: /note="Description of Artificial Sequence: Synthetic single chain variable fragment"
MALPVTALLLPLALLLHAARPEIVLTQSPATLSLSPGERATLSCSVSSSISSSNLHWYQQKPGQAPRLLIYGTSNLASGIPARFSGSGSGTDFTLTISSLEPEDFAVYYCQQWSSYPHTFGGGTKVEIKGGGGSGGGGSGGGGSQVQLVQSGAEVKKPGASVKVSCKASGYTFTNYLIEWVRQAPGQGLEWMGLINPGSGGTNYNEKFKGRVTMTTDTSTSTAYMELRSLRSDDTAVYYCARRSPLGSWIYYAYDGVAYWGQGTLVTVSSTTTPAPRPPTPAPTIASQPLSLRPEACRPAAGGAVHTRGLDFACDIYIWAPLAGTCGVLLLSLVITLYCKRGRKKLLYIFKQPFMRPVQTTQEEDGCSCRFPEEEEGGCELRVKFSRSADAPAYKQGQNQLYNELNLGRREEYDVLDKRRGRDPEMGGKPRRKNPQEGLYNELQKDKMAEAYSEIGMKGERRRGKGHDGLYQGLSTATKDTYDALHMQALPPR

SEQ ID NO: 6002 - protein, 244 aa, Artificial Sequence
  source: /note="Description of Artificial Sequence: Synthetic single chain variable fragment"
EVQLQQSGPELVKPGASMKISCKASGYSFTGYTMNWVKQSHGKNLEWIGLINPYNGGTIYNQKFKGKATLTVDKSSSTAYMELLSLTSEDSAVYYCARDYGFVLDYWGQGTTLTVSSGGGGSGGGGSGGGGSGGGGSQIVLTQSPSIMSVSPGEKVTITCSASSSVSYMHWFQQKPGTSPKLCIYSTSNLASGVPARFSGRGSGTSYSLTISRVAAEDAATYYCQQRSNYPPWTFGGGTKLEIK

SEQ ID NO: 6003 - protein, 244 aa, Artificial Sequence
  source: /note="Description of Artificial Sequence: Synthetic single chain variable fragment"
EVQLQQSGPELVKPGASMKISCKASGYSFTGYTMNWVKQSHGKNLEWIGLINPYNGGTIYNQKFKGKATLTVDKSSSTAYMELLSLTSEDSAVYYCARDYGFVLDYWGQGTTLTVSSGGGGSGGGGSGGGGSGGGGSQIVLTQSPAIMSASPGEKVTITCSASSSVSYLHWFQQKPGTSPKLWVYSTSNLPSGVPARFGGSGSGTSYSLTISRMEAEDAATYYCQQRSIYPPWTFGGGTKLEIK

SEQ ID NO: 6004 - protein, 244 aa, Artificial Sequence
  source: /note="Description of Artificial Sequence: Synthetic single chain variable fragment"
EVQLQQSGPELVKPGASMKISCKASGYSFTGYTMNWVKQSHGKNLEWIGLINPYNGGTIYNQKFKGKATLTVDKSSSTAYMELLSLTSEDSAVYYCARDYGFVLDYWGQGTTLTVSSGGGGSGGGGSGGGGSGGGGSQIVLTQSPSIMSVSPGEKVTITCSASSSVSYMHWFQQKPGTSPKLGIYSTSNLASGVPARFSGRGSGTSYSLTISRVAAEDAATYYCQQRSNYPPWTFGGGTKLEIK

SEQ ID NO: 6005 - protein, 239 aa, Artificial Sequence
  source: /note="Description of Artificial Sequence: Synthetic single chain variable fragment"
EVQLQQSGPELVKPGASMKISCKASGYSFTGYTMNWVKQSHGKNLEWIGLINPYNGGTIYNQKFKGKATLTVDKSSSTAYMELLSLTSEDSAVYYCARDYGFVLDYWGQGTTLTVSSGGGGSGGGGSGGGGSQIVLTQSPSIMSVSPGEKVTITCSASSSVSYMHWFQQKPGTSPKLCIYSTSNLASGVPARFSGRGSGTSYSLTISRVAAEDAATYYCQQRSNYPPWTFGGGTKLEIK

SEQ ID NO: 6006 - protein, 241 aa, Artificial Sequence
  source: /note="Description of Artificial Sequence: Synthetic single chain variable fragment"
DIQMTQSPASLSASVGETVTITCRASENIDSYLAWYQQKQGKSPQLLVYASTLLVDGVPSRFSGSRSGTQFSLKINSLQSEDVARYYCQHYYSIPYTFGSGTKLEIKGGGGSGGGGSGGGGSEVKLVESGGGLVKPGGSLKLSCAASGFTFNSYTMSWVRQTPAKRLEWVVTISSGGGRTYYPDSVKGRFTISRDNARNTLYLQMSSLRSEDTAMYYCIRGDYRYDGFAYWGQGTVVTVST

SEQ ID NO: 6007 - protein, 241 aa, Artificial Sequence
  source: /note="Description of Artificial Sequence: Synthetic single chain variable fragment"
EVKLVESGGGLVKPGGSLKLSCAASGFTFNSYTMSWVRQTPAKRLEWVVTISSGGGRTYYPDSVKGRFTISRDNARNTLYLQMSSLRSEDTAMYYCIRGDYRYDGFAYWGQGTVVTVSTGGGGSGGGGSGGGGSDIQMTQSPASLSASVGETVTITCRASENIDSYLAWYQQKQGKSPQLLVYASTLLVDGVPSRFSGSRSGTQFSLKINSLQSEDVARYYCQHYYSIPYTFGSGTKLEIK

SEQ ID NO: 6008 - protein, 247 aa, Artificial Sequence
  source: /note="Description of Artificial Sequence: Synthetic single chain variable fragment"
EVQLQQSGAEVKKPGSSVKVSCKASGGTFSSYAISWVRQAPGQGLEWMGGIIPIFGTANYAQKFQGRVTITADESTSTAYMELSSLRSEDTAVYYCARDLEMATIMGGYWGQGTLVTVSSGGGGSGGGGSGGGGSQSALTQPASVSGSPGQSITISCTGTSSDVGGYNYVSWYQQHPGKAPKLMIYDVSNRPSGVSNRFSGSKSGNTASLTISGLQAEDEADYYCSSYTSSSTLDVVFGGGTKLTVL

SEQ ID NO: 6009 - protein, 245 aa, Artificial Sequence
  source: /note="Description of Artificial Sequence: Synthetic single chain variable fragment"
EVQLVESGGGVVQPGGSLRLSCAASGFTFDDYAMHWVRQAPGKGLEWVSLISGDGGSTYYADSVKGRFTISRDNSKNTLYLQMNSLRVEDTAVYYCARVFDSYYMDVWGKGTTVTVSSGGGGSGGGGSGSGGSEIVLTQSPLSLPVTPGQPASISCRSSQSLVYTDGNTYLNWFQQRPGQSPRRLIYKVSNRDSGVPDRFSGSGSDTDFTLKISRVEAEDVGIYYCMQGTHWSFTFGQGTRLEIK

SEQ ID NO: 6010 - protein, 247 aa, Artificial Sequence
  source: /note="Description of Artificial Sequence: Synthetic single chain variable fragment"
QVQLQESGPGLVKPSETLSLTCTVSGGSISSSSYYWGWIRQPPGKGLEWIGSIYYSGSTYYNPSLKSRVSISVDTSKNQFSLKLKYVTAADTAVYYCATPGTYYDFLSGYYPFYWGQGTLVTVSSGGGGSGGGGSGGGGSDIVMTQSPSSLSASVGDRVTITCRASQGISSYLAWYQQKPGKAPKLLIYAASTLQSGVPSRFSGSGSGTDFTLTISSLQPEDFATYYCQQLNSYPYTFGQGTKLEIK

SEQ ID NO: 6011 - protein, 239 aa, Artificial Sequence
  source: /note="Description of Artificial Sequence: Synthetic single chain variable fragment"
QVQLVESGGGLVQPGGSLRLSCAASGFTFSSYWMSWVRQAPGKGLEWVANINEDGSAKFYVDSVKGRFTISRDNAKNSLYLQMNSLRAEDTAVYFCARDLRSGRYWGQGTLVTVSSGGGGSGGGGSGGGGSEIVLTQSPGTLSLSPGGRATLSCRASQSISGSFLAWYQQKPGQAPRLLIYGASSRATGIPDRFSGSGSGTDFTLTISRLEPEDFAVYYCQQYGSSPPTFGLGTKLEIK

SEQ ID NO: 6012 - protein, 245 aa, Artificial Sequence
  source: /note="Description of Artificial Sequence: Synthetic single chain variable fragment"
EVQLQQSGPGLVRPSETLSLTCTVSGGPVRSGSHYWNWIRQPPGRGLEWIGYIYYSGSTNYNPSLENRVTISIDTSNNHFSLKLSSVTAADTALYFCARGTATFDWNFPFDSWGQGTLVTVSSGGGGSGGGGSGSGGSDIQMTQSPSSLSASIGDRVTITCRASQSISSYLNWYQQKPGKAPKLLIYAASSLQSGVPSRFSGSGSGTDFTLTISSLQPEDFATYYCQQSYSTPWTFGQGTKLEIK

SEQ ID NO: 6013 - protein, 249 aa, Artificial Sequence
  source: /note="Description of Artificial Sequence: Synthetic single chain variable fragment"
QVQLQESGAGLLKPSETLSLTCAVYGGSFSGYYWSWIRQPPGKGLEWVGEINHSGSTNYNPSLKSRVTISVDTSKNQFSLKLSSVTAADTAVYYCARGSGLVVYAIRVGSGWFDYWGQGTLVTVSSGGGGSGGGDSGGGGSDIQMTQSPSSLSASVGDRVTITCRASQSISSYLNWYQQKPGKAPKLLMYAASSLQSGVPSRFSGSGSGTDFTLTISSLQPEDFATYYCQQSYSTPPWTFGQGTKVDIK

SEQ ID NO: 6014 - protein, 255 aa, Artificial Sequence
  source: /note="Description of Artificial Sequence: Synthetic single chain variable fragment"
EVQLVESGGGLVKPGGSLRLSCAASGFTFSSYSMNWVRQAPGKGLEWVSSISSSSSYIYYADSVKGRFTISRDNAKNSLYLQMNSLRAEDTAVYYCARDPSSSGSYYMEDSYYYGMDVWGQGTTVTVSSGGGGSGGGGSGGGGSNFMLTQPHSVSESPGKTVTISCTGSSGSIASNYVQWYQQRPGSAPTTVIYEDNQRPSGVPDRFSGSIDSSSNSASLTISGLKTEDEADYYCQSYDSSNQVVFGGGTKLTVL

SEQ ID NO: 6015 - protein, 239 aa, Artificial Sequence
  source: /note="Description of Artificial Sequence: Synthetic single chain variable fragment"
QVNLRESGGGLVQPGGSLRLSCAASGFTFSSYEMNWVRQAPGKGLEWVSYISSSGSTIYYADSVKGRFTISRDNAKNSLYLQMNSLRAEDTAVYYCAREALGSSWEWGQGTTVTVSSGGGGSGGGGSGGGGSDIQMTQSPSSLSASVGDRVTITCQASQDISNYLNWYQQKPGKAPKLLIYDASNLETGVPSRFSGSGSGTDFTFTISSLQPEDIATYYCQQYDNLPLTFGGGTKLEIK

SEQ ID NO: 6016 - protein, 246 aa, Artificial Sequence
  source: /note="Description of Artificial Sequence: Synthetic single chain variable fragment"
QVQLVQSGAEVKEPGASVKVSCKAPANTFSDHVMHWVRQAPGQRFEWMGYIHAANGGTHYSQKFQDRVTITRDTSANTVYMDLSSLRSEDTAVYYCARGGYNSDAFDIWGQGTMVTVSSGGGGSGGGGSGGGGSGGGGSDIVMTQSPSSVSASVGDRVTITCRASQDISSWLAWYQQKPGKAPKLLIYAASSLQSGVPSRFNGSGSGTDFTLTISSLQPEDFATYYCQQSYSTPLTFGGGTKVEIK

SEQ ID NO: 6017 - protein, 248 aa, Artificial Sequence
  source: /note="Description of Artificial Sequence: Synthetic single chain variable fragment"
QVQLVQSGGGLVQPGGSLRLSCAASGFTFSSYSMNWVRQAPGKGLEWVSYISSSSSTIYYADSVKGRFTISRDNAKNSLYLQMNSLRAEDTAVYYCARDLSVRAIDAFDIWGQGTMVTVSSGGGGSGGGGSGGGGSGGGGSDIVLTQSPSSLSASVGDRVTITCQASQDISNYLNWYQQKPGKAPKLLIYDASNLETGVPSRFSGSGSGTDFTFTISSLQPEDFATYYCQQAYSTPFTFGPGTKVEIK

SEQ ID NO: 6018 - protein, 246 aa, Artificial Sequence
  source: /note="Description of Artificial Sequence: Synthetic single chain variable fragment"
EVQLVQSGGGVVRSGRSLRLSCAASGFTFNSYGLHWVRQAPGKGLEWVALIEYDGSNKYYGDSVKGRFTISRDKSKSTLYLQMDNLRAEDTAVYYCAREGNEDLAFDIWGQGTLVTVSSGGGGSGGGGSGGGGSGGGGSEIVLTQSPSSLSASVGDRVTITCQASQFIKKNLNWYQHKPGKAPKLLIYDASSLQTGVPSRFSGNRSGTTFSFTISSLQPEDVATYYCQQHDNLPLTFGGGTKVEIK

SEQ ID NO: 6019 - protein, 255 aa, Artificial Sequence
  source: /note="Description of Artificial Sequence: Synthetic single chain variable fragment"
QVQLVESGGGLVQPGGSLRLSCAASGFNVSSNYMTWVRQAPGKGLEWVSVIYSGGATYYGDSVKGRFTVSRDNSKNTVYLQMNRLTAEDTAVYYCARDRLYCGNNCYLYYYYGMDVWGQGTLVTVSSGGGGSGGGGSGGGGSGGGGSDIQVTQSPSSLSASVGDRVTITCRASQSISSYLNWYQQKPGKAPKLLIYAASSLQSGVPSRFSGSGSGTDFTLTISSLQPEDFATYYCQQSYSTPPLTFGQGTKVEIK

SEQ ID NO: 6020 - protein, 247 aa, Artificial Sequence
  source: /note="Description of Artificial Sequence: Synthetic single chain variable fragment"
QVQLVQSGAEVKKSGASVKVSCKASGYPFTGYYIQWVRQAPGQGLEWMGWIDPNSGNTGYAQKFQGRVTMTRNTSISTAYMELSSLRSEDTAVYYCASDSYGYYYGMDVWGQGTLVTVSSGGGGSGGGGSGGGGSGGGGSDIQMTQSPSSLSASVGDRVTFTCRASQGISSALAWYQQKPGKPPKLLIYDASSLESGVPSRFSGSGSGTDFTLTISSLQPEDFATYYCQQFNNYPLTFGGGTKVEIK

SEQ ID NO: 6021 - protein, 247 aa, Artificial Sequence; identical to SEQ ID NO: 6008
  source: /note="Description of Artificial Sequence: Synthetic single chain variable fragment"

SEQ ID NO: 6022 - protein, 245 aa, Artificial Sequence
  source: /note="Description of Artificial Sequence: Synthetic single chain variable fragment"
EVQLVESGGGVVQPGGSLRLSCAASGFTFDDYAMHWVRQAPGKGLEWVSLISGDGGSTYYADSVKGRFTISRDNSKNTLYLQMNSLRVEDTAVYYCARVFDSYYMDVWGKGTTVTVSSGGGGSGGGGSGSGGSEIVLTQSPLSLPVTPGQPASISCRSSQSLVYTDGNTYLNWFQQRPGQSPRRLIYKVSNRDSGVPDRFSGSGSDTDFTLKISRVEAEEVGIYYCMQGTHWSFTFGQGTRLEIK

SEQ ID NO: 6023 - protein, 247 aa, Artificial Sequence; identical to SEQ ID NO: 6010
  source: /note="Description of Artificial Sequence: Synthetic single chain variable fragment"

SEQ ID NO: 6024 - protein, 239 aa, Artificial Sequence; identical to SEQ ID NO: 6011
  source: /note="Description of Artificial Sequence: Synthetic single chain variable fragment"

SEQ ID NO: 6025 - protein, 245 aa, Artificial Sequence; identical to SEQ ID NO: 6012
  source: /note="Description of Artificial Sequence: Synthetic single chain variable fragment"

SEQ ID NO: 6026 - protein, 249 aa, Artificial Sequence; identical to SEQ ID NO: 6013
  source: /note="Description of Artificial Sequence: Synthetic single chain variable fragment"

SEQ ID NO: 6027 - protein, 255 aa, Artificial Sequence
  source: /note="Description of Artificial Sequence: Synthetic single chain variable fragment"
EVQLVESGGGLVKPGGSLRLSCAASGFTFSSYSMNWVRQAPGKGLEWVSSISSSSSYIYYADSVKGRFTISRDNAKNSLYLQMNSLRAEDTAVYYCARDPSSSGSYYMEDSYYYGMDVWGQGTTVTVSSGGGGSGGGGSGGGGSNFMLTQPHSVSESFGKTVTISCTGSSGSIASNYVQWYQQRPGSAPTTVIYEDNQRPSGVPDRFSGSIDSSSNSASLTISGLKTEDEADYYCQSYDSSNQVVFGGGTKLTVL

SEQ ID NO: 6028 - protein, 239 aa, Artificial Sequence; identical to SEQ ID NO: 6015
  source: /note="Description of Artificial Sequence: Synthetic single chain variable fragment"

SEQ ID NO: 6029 - protein, 246 aa, Artificial Sequence; identical to SEQ ID NO: 6016
  source: /note="Description of Artificial Sequence: Synthetic single chain variable fragment"

SEQ ID NO: 6030 - protein, 248 aa, Artificial Sequence; identical to SEQ ID NO: 6017
  source: /note="Description of Artificial Sequence: Synthetic single chain variable fragment"

SEQ ID NO: 6031 - protein, 246 aa, Artificial Sequence; identical to SEQ ID NO: 6018
  source: /note="Description of Artificial Sequence: Synthetic single chain variable fragment"

SEQ ID NO: 6032 - protein, 255 aa, Artificial Sequence; identical to SEQ ID NO: 6019
  source: /note="Description of Artificial Sequence: Synthetic single chain variable fragment"

SEQ ID NO: 6033 - protein, 247 aa, Artificial Sequence
  source: /note="Description of Artificial Sequence: Synthetic single chain variable fragment"
QVQLVQSGAEVKKSGASVKVSCKASGYPFTGYYIQWVRQAPGQGLEWMGWIDPNSGNTGYAQKFQGRVTMTRNTSISTAYMELSSLRSEDTAVYYCASDSYGYYYGMDVWGQGTLVTVSSGGGGSGGGGSGGGGSGGGGSDIQMTQSPSSLSASVGDRVTFTCRASQGISSALAWYQQKPGKPPKLLIYDASSLESGVPSRFSGSGSGTDFTLTISSLQFEDFATYYCQQFNNYPLTFGGGTKVEIK

SEQ ID NO: 6034 - protein, 245 aa, Artificial Sequence
  source: /note="Description of Artificial Sequence: Synthetic single chain variable fragment"
EVQLVESGGGLVQPGGSLRLSCAASGFTFSSYEMNWVRQAPGKGLEWVSYISSSGSTIYYADSVKGRFTISRDNAKNSLYLQMNSLRAEDTAVYYCARDPYSSSWHDAFDIWGQGTMVTVSSGGGGSGGGGSGGGGSEIVLTQSPGTLSLSPGERATLSCRASQSVSSSYLAWYQQKPGQAPRLLIYGASSRATGIPDRFSGSGSGTDFTLTISRLEPEDFAVYYCQQYGSSPLTFGGGTKVDIK

SEQ ID NO: 6035 - protein, 250 aa, Artificial Sequence
  source: /note="Description of Artificial Sequence: Synthetic single chain variable fragment"
QVQLVQSGAEVKKPGESLKISCKGSGYTFTNYWIAWVRQMPGKGLEWMGIIYPDDSDTRYNPSFQGQVTMSADKSIDTAYLQWSSLKASDTAIYYCARPSGWNDNGYFDYWGRGTTVTVSSGGGGSGGGGSGGGGSALNFMLTQPHSVSASPGKTVTLSCTGSSGSIASNYVQWYRQRPGSAPTTVIYDDNQRPSGVPDRFSGSIDSSSNSASLTISGLKTEDEADYYCQSFDNDNHWVFGGGTKLTVLG

SEQ ID NO: 6036 - protein, 247 aa, Artificial Sequence
  source: /note="Description of Artificial Sequence: Synthetic single chain variable fragment"
QVQLQESGPGLVRSSGILSLTCSVSGVSVSSNNWWSWVRQTPGKGLEWIGEIYQTGTTNYNPSLKSRVAISLDKSRNQFSLILKSVTAADTAVYYCARTSSAWSNADWGKGTMVTVSSGGGGSGGGGSGGGGSALSSELTQDPSASGSPGQSVSISCTGTSSDVGGYNYVSWYQQHPGKAPKLMISEVTKRPSGVPDRFSGSKSGNTASLTVSGLQAEDEADYYCSSFGANNNYLVFGGGTKLTVLG

SEQ ID NO: 6037 - protein, 251 aa, Artificial Sequence
  source: /note="Description of Artificial Sequence: Synthetic single chain variable fragment"
QVQLQESGPRLVKPSQTLSLTCTVSNDSIISGDYFWSWIRQPPGKGLEWIGNIFYTGSTSYNPSLKSRLTMSLDTSKNQFSLRLSSVTAADTAVYFCARGRQGMNWNSGTYFDSWGRGTLVTVSSGGGGSGGGGSGGGGSALSYVLTQPPSVSVAPGKTANITCGGKNIGNKSVQWYQQKPGQAPVVVMYYDSDRPSGIPERFSGSNAGNTATLTIDRVEAGDEADYYCQVWDKSSDRPVFGGGTKLTVLG

SEQ ID NO: 6038 - protein, 245 aa, Artificial Sequence
  source: /note="Description of Artificial Sequence: Synthetic single chain variable fragment"
QVQLVQSGAEVKKPGASVKVSCKTSGYTFMEYYIHWVRQAPGQGLEWMGWSNPVTGTSGSSPKFRGRVTLTTDTSGNTAYLDLRSLRSDDTAVFYCARRHQQSLDYWGQGTLVTVSSGGGGSGGGGSGGGGSAQSVVTQPPSASGSPGQSVTISCSGYSSSNIGNNAVSWYQQLPGTAPKLLIFDNNKRPSGIPARFSGSQSGTTATLGITGLQTGDEADYFCGTWDSSLSAFVFGSGTKVTVLG

SEQ ID NO: 6039 - protein, 246 aa, Artificial Sequence
  source: /note="Description of Artificial Sequence: Synthetic single chain variable fragment"
EVQLVQSGAEVKKPGSSVKVSCKASGGSFSNYDFSWVRQAPGQGLEWMGEIINAFGSSRYAQKFQDRVTITADESASTAYMELRGLTSEDTATYYCARAERWELNMAFDMWGRGTLVTVSSGGGGSGGGGSGGGGSAQSVLTQPPSVSVAPGQTARITCGGDNIGRKNVHWYQQRPGLAPVLVVYDDTDRPSGIPERFSGSNSGDTATLTITWVEAGDEADYYCQLWDSDTYDVLFGGGTKLTVLG

SEQ ID NO: 6040 - protein, 247 aa, Artificial Sequence
  source: /note="Description of Artificial Sequence: Synthetic single chain variable fragment"
EVQLVQSGAEVKKPGSSVKVSCKSSGGPFSSYGISWVRQAPGQGLEWMGGISPIFGTANYAQKFQGRVTITADESTETAYMELSSLRSEDTAVYYCARDESPVGFYALDIWGRGTTVTVSSGGGGSGGGGSGGGGSALSYELTQPPSVSVAPGQTARINCGGDKIGSRSVHWYQQKPGQAPVMVVYDDSDRPSGIPERFSGSNSGNTATLTISSVEAGDEADYYCQVWDGSTDPWVFGGGTKVTVLG

SEQ ID NO: 6041 - protein, 255 aa, Artificial Sequence
  source: /note="Description of Artificial Sequence: Synthetic single chain variable fragment"
EVQLVQSGAEMKKPGSSVKVSCKASGGTFSSYAVNWVRQAPGQGLEWMGGIIPIFDTSNYAQKFQGRLTMTADDSTNTAYMELRSLRSEDTAVYYCARGAPRGTVMAFSSYYFDLWGQGTLVTVSSGGGGSGGGGSGGGGSALNFMLTQPHSVSESPGKTVIISCAGSGGNIATNYVQWYQHRPGSAPITVIYEDNQRPSGVPDRFSGSVDSSSNSASLTISGLQTEDEADYYCHSYDNTDQGVFGTGTKVTVLG

SEQ ID NO: 6042 - protein, 253 aa, Artificial Sequence
  source: /note="Description of Artificial Sequence: Synthetic single chain variable fragment"
EVQLVESGGGLVQPGRSLRLSCAASGFTFDDYDMHWVRQAPGKGLEWVSSISWSGGTIGYADSVKGRFTVSRDNAKNSLYLQMNSVRAEDTALYYCAKDRGAVAALPDYQYGMDVWGRGTLVTVSSGGGGSGGGGSGGGGSAQSALTQPASVSGSPGQSITISCTGTSSDIGSYNLVSWYQQHPGKAPKLMIYEDYKRASGVSNHFSGSKSGNTASLTISGLQAEDEADYYCSSYAGSSAWVFGGGTKVTVLG

SEQ ID NO: 6043 - protein, 245 aa, Artificial Sequence
  source: /note="Description of Artificial Sequence: Synthetic single chain variable fragment"
EVQLVQSGAEVRKPGSSMKVSCKASGDTFRNFAFSWVRQAPGQGLEWMGGVIPLVGPPKYAQKFQGRLTITADESTSTSYMDLTSLTLEDTAVYFCARGGVYAPFDKWGQGTLVTVSSGGGGSGGGGSGGGGSAQSVVTQPPSVSEAPRQRVTISCSGSSSNIGNNAVNWYQQLPGKAPKLLIYYNDLLPSGVSDRFSGSKSGTSASLAISGLQSEDEADYYCAAWDDSLNGWVFGGGTKVTVLG

SEQ ID NO: 6044 - protein, 244 aa, Artificial Sequence
  source: /note="Description of Artificial Sequence: Synthetic single chain variable fragment"
QVQLVQSGAEVRKPGASVKVSCKTSGYTFIDYYIHWVRQAPGQGLEWMGWVNPVTGTSGSSPNFRGRVTMTTDTSGNTAYMELRSLRSDDTAVFYCARRHQQSLDYWGQGTLVTVSSGGGGSGGGGSGGGGSAQSVLTQPPSVSAPPGQKVTISCSGSSSNIGTNYVSWYQQLPGTAPKLLIYDNHKRPSVIPDRFSGSKSGTSATLGISGLQTGDEADYYCGTWDYSLSTWVFGGGTKLTVLG

SEQ ID NO: 6045 - protein, 248 aa, Artificial Sequence
  source: /note="Description of Artificial Sequence: Synthetic single chain variable fragment"
QLQLQESGPGLVKPSGTLSLTCAVSGGSISTSDWWSWVRRPPGKGLEWIGEIYHSGSTNYHPSLKSRVTISLDKSKNQFSLKLSSVTAADTAVYYCAREGGHSGSYPLDYWGKGTLVTVSSGGGGSGGGGSGGGGSAQAVLTQPSSVSAAPGQKVTISCSGSSSNIGNNYVSWYQQLPGTAPKLLIYDNNKRPSGIPDRFSGSRSGTSATLGITGLQTGDEADYYCGTWDSSLSAVVFGTGTKLTVLG

SEQ ID NO: 6046 - protein, 250 aa, Artificial Sequence
  source: /note="Description of Artificial Sequence: Synthetic single chain variable fragment"
QLQLQESGPGLVKPSGTLSLTCAVSGGSISSTNWWSWVRQPPGKGLEWIGEIYHSGSTNYNPSLKSRVTISVDKSKNHFSLNLSSVTAADTAVYYCARDSMGSTGWHYGMDLWGKGTLVTVSSGGGGSGGGGSGGGGSAQSALTQPASVSGSPGQSIAISCTGTSSDVGGYNYVSWYQQHPGKAPKLMIYAVTNRPSGVSDRFSGSKSGNTASLTISGLQADDEADYYCSSYTSSSSLVFGGGTKLTVLG

SEQ ID NO: 6047 - protein, 240 aa, Artificial Sequence
  source: /note="Description of Artificial Sequence: Synthetic single chain variable fragment"
GVQLVESGGGLVKPGGSLRLSCAASGFTFSSYTMNWVRQAPGKGLEWVSYISSSGSATYYADSVKGRFTISRDNANNSLYLQMNSLRAEDTAVYYCARGYRYGMDVWGQGTLVTVSSGGGGSGGGGSGGGGSGIVMTQSPSTLSASVGDRVTITCRASQGISSWLAWYQQKPGRAPKVLIYKASTLESGVPSRFSGSGSGTDFTLTISSLQPEDFATYYCQQSYSTPWTFGQGTKLEIKR

SEQ ID NO: 6048 - protein, 246 aa, Artificial Sequence
  source: /note="Description of Artificial Sequence: Synthetic single chain variable fragment"
QVQLVQSGGGLVQPGGSLRLSCAASGFTFSSYAMSWVRQAPGKGLEWVSAISGSGGSTYYADSVKGRFTISRDNSKNTLYLQMNSLRAEDTAVYYCAKSSSSWYRSYYFDYWGQGTLVTVSSGGGGGSGGGGSGGGGSQSALTQDPAVSVALGQTVRITCRGDSLRNYYASWYQQKPGQAPVLVIYGKNNRPSGIPDRFSGSFSGNTASLTITGAQAEDEADYYCNSRDSSANQMFGGGTKVTVLG

SEQ ID NO: 6049 - protein, 249 aa, Artificial Sequence
  source: /note="Description of Artificial Sequence: Synthetic single chain variable fragment"
QVQLQQSGAEVRKPGASVKISCKTSGYTFMDYYIHWVRQAPGQGLEWMGWSNPVTGTSGSSPKFRGRVTLTTDTSGNTAYLDLRSLRSDDTAVFYCARRHQQSLDYWGQGTLVTVSSGGGGSGGGGSGGGGSAQAVLTQPSSLSASPGASASLTCTLRSDINVGSYSINWYQQKPGSPPQYLLNYRSDSDKQQGSGVPSRFSGSKDASANAGILLISGLQSEDEADYYCMIWYRTAWVFGGGTKVTVLG

SEQ ID NO: 6050 - protein, 245 aa, Artificial Sequence
  source: /note="Description of Artificial Sequence: Synthetic single chain variable fragment"
QVQLQESGGGLVQPGGSLRLSCAASGFTFSSYAMSWVRQAPGKGLEWVSAISGSGGSTYYADSVKGRFTISRDNSKNTLYLQMNSLRAEDTAVYYCASQHVGEQSRYFDYWGQGTLVTVSSGGGGGSGGGGSGGGGSDIVMTQSPSSLSASIGDRVTITCRASHSISSYVNWYQKKPGKAPNLLIYAASYLPRGVPSRFSGSGLGTDFTLTISNLQPEDFATYYCQESYSTPYSFGQGTKVDIKR

SEQ ID NO: 6051 - protein, 244 aa, Artificial Sequence
  source: /note="Description of Artificial Sequence: Synthetic single chain variable fragment"
QVQLVQSGAEVRKPGASVKVSCKTSGYTFIEYYIHWVRQAPGQGLEWMGWSNPVTGTSGSSPKFRGRVTLTTDTSGNTAYLDLRSLRSDDTAVFYCARRHQQSLDYWGRGTTVTVSSGGGGSGGGGSGGGGSAQSVLTQPPSVSAAPGQKVTISCSGTNSNIGNYYVSWYQQLPGTAPKLLIYDNNKRPSGVPDRFSGSKSGTSASLVISGLRSEDEADYYCAAWDGSLTAWVFGGGTKVTVLG

SEQ ID NO: 6052 - protein, 241 aa, Artificial Sequence
  source: /note="Description of Artificial Sequence: Synthetic single chain variable fragment"
QVQLQESGGGVVQPGRSLRLSCAASGFTFSSYGMHWVRQAPGKGLEWVSAIGSSGGSTHDADTVKGRFTISRDNAKNSLYLQMNSLRAEDTAVYYCARDRARGFDYWGQGTLVTVSSGGGGGSGGGGSGGGGSEIVLTQSPSTLSASIGDRVTITCRASQGISSYLAWYQQKPGKAPKLLIYGASSLQSGVPSRFSGRGSGADFTLTISSLQPEDFATYYCQQLISYPLTFGGGTKVEIKR

SEQ ID NO: 6053 - protein, 250 aa, Artificial Sequence
  source: /note="Description of Artificial Sequence: Synthetic single chain variable fragment"
QVQLQESGPGLVKPSGTLSLTCAVSGDSISSSNWWTWVRQPPGKGLEWIGEIFHSGTTNYNPSLNNRVTISLDESRNQFSLELSSVTAADTAIYYCARDSGNYDDNRGYDYWGRGTLVTVSSGGGGSGGGGSGGGGSAQSVLTQPPSVSGAPGQRVTISCAGTSSNIGAGFDVHWYQLLPGRAPKLLIYGNNNRPSGVPDRFSGSKSGTSASLAISGLQSEDEGDYYCAAWDDTVGGPVFGGGTKLTVLG

SEQ ID NO: 6054 - protein, 241 aa, Artificial Sequence
  source: /note="Description of Artificial Sequence: Synthetic single chain variable fragment"
QVQLVQSGAEVKKPGASVKVSCKASGYTFTDYYMHWVRQAPGEGLEWMGWMNPNSGGTNYAQKFQGRVTMTRDTSISTAYMELSRLRSDDTAVYYCARSHYWDSWSPGTLVTVSSGGGGGSGGGGSGGGGSSALTQPASVSGSPGQSITISCTGTSGDVGGYNYVSWYQQHPGKAPKLMIYDVSNRPSGVSNRFSGSKSGNTASLTISGLQAEDEADYYCTSYAGSRNLVFGGGTKLTVLG

SEQ ID NO: 6055 - protein, 243 aa, Artificial Sequence
  source: /note="Description of Artificial Sequence: Synthetic single chain variable fragment"
QVQLQESGGGLLQPGGSLRLSCAASRFTFSNYAMSWVRQAPGKGLEWVSAISGSGASTYYADSVKGRFTISRDNSKNTLYLQMNSLRAEDTAVYYCSNLYGDYDYWGQGTLVTVSSGGGGGSGGGGSGGGGSQSVLTQPASVSGSPGQSITISCTGTSSDVGGYNYVSWYQQHPGKAPKLMIYDVSNRPSGVSNRFSGSKSGNTASLTISGLQAEDEADYYCSSYTSSSTLLFGGGTKLTVLG

SEQ ID NO: 6056 - protein, 240 aa, Artificial Sequence
  source: /note="Description of Artificial Sequence: Synthetic single chain variable fragment"
QLQLQESGPGLVKPSGTLSLTCAVSGDSVSSYYWWSWVRQPPGKGLEWIGEIFRDGSSNYNRSLKSRVTISPDKPKNQFSLRLSSVTAADTAIYYCARHIRGYDAFDIWGRGTLVTVSSGGGGSGGGGSGGGGSAQSVLTQPPSVSGAPGQRVTISCTGSSSNIGAGYDVHWYQQFPGRAPKLLIYGNTNRPSGVPDRFSGSKSDISASLAITGLQAEDEADYYCQSYDSNLTGVFGGGT

SEQ ID NO: 6057 - protein, 255 aa, Artificial Sequence
  source: /note="Description of Artificial Sequence: Synthetic single chain variable fragment"
QVQLQESGGGVVQPGGSLRLSCAASGFTFSSYSMNWVRQAPGKGLEWVSSISSSSSYIYYADSVKGRFTISRDNAKNSLYLQMNSLRAEDTAVYYCARDLPSDDYGDYDYYYYGMDVWGQGTTVTVSSGGGGGSGGGGSGGGGSQSVLTQPPSASGTPGQRVTLFCSGSSSNIASNSVKWYQQPPQRAPKLLMFSDDQRPSGVPVRFSASKSGTSASLAISGLQSEDEADYYCAAWDDSLNAEVFGGGTKVTVLG

SEQ ID NO: 6058 - protein, 251 aa, Artificial Sequence
  source: /note="Description of Artificial Sequence: Synthetic single chain variable fragment"
QVQLQESGPGLVKPSGTLSLTCAVSGGSISSTNWWSWVRQPPGKGLEWIGEIYHSGSTNYNPSLKSRVTISVDKSKNHFSLNLSSVTAADTAVYYCARDSMGSTGWHYGMDLWGQGTTVTVSSGGGGSGGGGSGGGGSAQSALTQPASVSGSPGQSITISCTGTSSDVGGYNYVSWYQQHPGKAPKLMIYEVSNRPLGVSNRFSGSKSGNTASLTISGLQAEDEGDYYCSSYTSSTTLIVFGGGTKLTVLG

SEQ ID NO: 6059 - protein, 248 aa, Artificial Sequence
  source: /note="Description of Artificial Sequence: Synthetic single chain variable fragment"
QVQLQESGPGLVKPSGTLSLTCAVSGGSISTSDWWSWVRRPPGKGLEWIGEIYHSGSTNYHPSLKSRVTISLDKSKNQFSLKLSSVTAADTAVYYCAREGGHSGSYPLDYWGQGTLVTVSSGGGGSGGGGSGGGGSAQSVLTQPPSVSGTTGQRVILSCSGGNSNIGYNSVNWYQQLPGTAPKLLIYTDDQRPSGVPDRFSGSRSGTSASLAISGLQSEDEADYYCATWDDSLNAGVFGGGTKLTVLG

SEQ ID NO: 6060 - protein, 245 aa, Artificial Sequence
  source: /note="Description of Artificial Sequence: Synthetic single chain variable fragment"
QVQLVQSGAEVRKPGASVRVSCKTSGYTFLEYYIHWVRQAPGQGLEWMAWSNPVTGTSGSSPKFRGRVTLTADTSGNTAYLDLKSLTSDDTAIFYCARRHQQSLDYWGQGTLVTVSSGGGGSGGGGSGGGGSAQSVLTQPPSVSAAPGQTVTISCSGSNSNIGNNHVSWYRQLPETAPKLLIYDNNKRPSGIPDRFSGSKSGTSATLDITGLQTGDEADYYCATWDNSLSAPWVFGGGTKLTVLG

SEQ ID NO: 6061 - protein, 245 aa, Artificial Sequence
  source: /note="Description of Artificial Sequence: Synthetic single chain variable fragment"
QVQLQESGGGLVQPGGSLRLSCAASGFTFSNYAMSWVRQAPGKGLEWVSAISGSGGSTYYADSVKGRFTISRDNSKNTLYLQMNSLRAEDTAVYYCAKDRFRAAAYWGQGTLVTVSSGGGGGSGGGGSGGGGSQSVLTQPPSVSAAPGQKVTISCTGSSSNIGAGYDVHWYQQLPGTAPKLLIYGNSNRPSGVPDRFSGSKSGTSASLAISGLQSEDEADYYCAAWDDILNGEIFGGGTKVTVLG

SEQ ID NO: 6062 - protein, 252 aa, Artificial Sequence
  source: /note="Description of Artificial Sequence: Synthetic single chain variable fragment"
QVQLQESGAEVKKPGSSVKVSCKASGGTFSSSAISWVRQAPGQGLEWMGGIIPVFGTANYAQKFQDRVTITADESTSTAYLELSRLTSEDTAVYYCASRGEYDYGDYDVYYYYMEVWGQGTLVTVSSGGGGSGGGGSGGGGSAQSVLTQPPSVSVAPGQTARLTCGANNIGSTSVHWYQQKPGQAPVLVIYDDTDRPSGIPERFSGSNSGNTATLTIRRVEAGDEADYYCQVWDTNSDHVIFGGGTKLTVLG

SEQ ID NO: 6063 - protein, 249 aa, Artificial Sequence
  source: /note="Description of Artificial Sequence: Synthetic single chain variable fragment"
EVQLVQSGAEVKKPGSSVKVSCQASGGTFTSHAMYWVRQAPGQGLEWMGGIIPIFGRTNYAQKFQGRVTFTADMSTSTAYMEMTSLRSDDTAVYYCARGDNWNDLYPIDYWGRGTLVTVSSGGGGSGGGGSGGGGSALNFMLTQPHSVSESPGKTVTISCTRSSGSIATTYVQWFQQRPGSSPTTVIYDDDQRPSGVPDRFSGSIDSSSNSASLTISGLMPEDEADYYCQSYDNTDLVFGGGTQLTVLS

SEQ ID NO: 6064 - protein, 248 aa, Artificial Sequence
  source: /note="Description of Artificial Sequence: Synthetic single chain variable fragment"
EVQLVQSGAEVKKPGASVKVSCKVSGYSLSELSMHWVRQAPGKGLEWMGGFDPQNGYTIYAQEFQGRITMTEDTSTDTVYMELGSLRSEDTAVYFCAAIEITGVNWYFDLWGKGTLVTVSSGGGGSGGGGSGGGGSALSSELTQDPDVSVALGQTVRITCQGDSLKKFYPGWYQQKPGQAPLLVLYGENIRPSRIPDRFSGSSSGNTATLTITGAQAEDEAVYYCNSREASVHHVRVFGGGTKLTVLG

SEQ ID NO: 6065 - protein, 251 aa, Artificial Sequence
  source: /note="Description of Artificial Sequence: Synthetic single chain variable fragment"
QVQLQESGPGLVKPSGTLSLTCAVSGGSISTSDWWSWVRRPPGKGLEWIGEIYHSGSTNYHPSLKSRVTISLDKSKNQFSLKLSSVTAADTAVYYCAREGGHSGSYPLDYWGKGTLVTVSSGGGGSGGGGSGGGGSALNFMLTQPHSVSESPGKTVTISCTRSSGSIASNYVQWYQQRPGSSPTTVIYEDNQRPSGVPDRFSGSIDSSSNSASLTISGLKTEDEADYYCQSYDSSNQGVVFGGGTKLTVLG

SEQ ID NO: 6066 - protein, 251 aa, Artificial Sequence
  source: /note="Description of Artificial Sequence: Synthetic single chain variable fragment"
QLQLQESGPGLVKPSGTLSLTCAVSGGSISTSDWWSWVRRPPGKGLEWIGEIYHSGSTNYHPSLKSRVTISLDKSKNQFSLKLSSVTAADTAVYYCAREGGHSGSYPLDYWGQGTLVTVSSGGGGSGGGGSGGGGSALNFMLTQPHSVSESPGKTVTISCTGSSGSIASNYVQWYQQRPGSAPTTLIYEDDQRPSGVPDRFSGSVDSSSNSASLTISGLKTEDEADYYCQSYDRSNQAVVFGGGTKLTVLG

SEQ ID NO: 6067 - protein, 253 aa, Artificial Sequence
  source: /note="Description of Artificial Sequence: Synthetic single chain variable fragment"
QVQLVQSGPEVKKPGASVEVSCKASGYTFTGDYMHWVRQAPGQGPEWMGWINPQTGVTKYAQKFQGRVTMARDTSINTAYMELRGLRSDDTAVYYCVREDHNYDLWSAYNGLDVWGQGTLVTVSSGGGGSGGGGSGGGGSAQSVLTQPPSVSAAPGQKVTISCSGSSSNIGNNHVSWYQQLAGTAPKLLIFDNDKRPSGIPDRFSGSKSGTSATLGITGLQTGDEADYYCGTWDKSPTDIYVFGSGTKLTVLG

SEQ ID NO: 6068 - protein, 247 aa, Artificial Sequence
  source: /note="Description of Artificial Sequence: Synthetic single chain variable fragment"
QVQLQESGPGLVKPSGTLSLTCAVSGGSISSSNWWSWVRQAPGKGLEWIGEIYYGGSTNYNPSLKSRVTLSVDKSKNQFSLRLISVTAADTAVYYCARSSGLYGDYGNLWGRGTLVTVSSGGGGSGGGGSGGGGSAQSVVTQPPSVSAAPGQKVTISCSGSASNIGDHYISWYQQFPGTAPKLLISDNDQRPSGIPDRFSGSKSGTSATLGITGLQTGDEADYYCGTWDSNLSSWVFGSGTKVTVLG

SEQ ID NO: 6069 - protein, 244 aa, Artificial Sequence
  source: /note="Description of Artificial Sequence: Synthetic single chain variable fragment"
QVQLVQSGAEVRKPGASVKVSCKTSGYTFMDYYIHWVRQAPGQGLEWMGWSNPVTGTSGSSPKFRGRVTLTTDTSGNTAYLDLRSLRSDDTAVFYCARRHQQSLDYWGQGTMVTVSSGGGGSGGGGSGGGGSAQSVLTQPPSVSAAPGQKVTISCSGSSSNIGNNYVSWYQQLPGTAPKLLMYENSKRPSGIPDRFSGSKSGTSGTLGITGLQTGDEADYYCGTWDTSLRAWVFGGGTKVTVLG

SEQ ID NO: 6070 - protein, 250 aa, Artificial Sequence
  source: /note="Description of Artificial Sequence: Synthetic single chain variable fragment"
EVQLVQSGAEVKKPGATLKVSCKVSAYTFTDYSMHWVQQAPGKGLKWMGLIDLEDGNTIYAEEFQDRVTITADTSTDTAYMDLSSLRSEDTAVFYCAISPLRGLTADVFDVWGQGTLVTVSSGGGGSGGGGSGGGGSAQSALTQPASASGSPGQSITISCTGTSSDIGRYDFVSWYQRQPGKAPKLMIYDVINRPSGVSSRFSGSKSGNTASLTISGLQAEDEADYYCSSYAGSTTLYVFGTGTKLTVLG

SEQ ID NO: 6071 - protein, 246 aa, Artificial Sequence
  source: /note="Description of Artificial Sequence: Synthetic single chain variable fragment"
QVQLQESGPGLVKPSATLSLTCAVSGGSISSNHWWSWVRQSPGKGLEWIGEIYTYGGANYNPSLKSRVDISMDKSKNQFSLHLSSVTAADTAVYYCGRHLTGYDCFDIWGQGTLVTVSSGGGGSGGGGSGGGGSAQAVLTQPSSVSGAPGQRVTISCTGSSSNIGAGYDVHWYQQLPGTAPKLLIYGNSNRPSGVPDRFSGSKSGTSASLAITGLQAEDEADYYCQSYDSSLSGVFGTGTQLTVLS

SEQ ID NO: 6072 - protein, 249 aa, Artificial Sequence
  source: /note="Description of Artificial Sequence: Synthetic single chain variable fragment"
QVQLQESGPGLVKPSGTLSLTCAVSGGSISTSDWWSWVRRPPGKGLEWIGEIYHSGSTNYHPSLKSRVTISLDKSKNQFSLKLSSVTAADTAVYYCAREGGHSGSYPLDYWGQGTLVTVSSGGGGSGGGGSGGGGSALNFMLTQPHSVSESPGKTVTISCTRSSGSIASKYVQWYQQRPGSAPTSVIYEDNQRPSGVPDRFSGSIDSASNSASLTISGLKTEDEADYYCQSDDGSSVVFGGGTKVTVLG

SEQ ID NO: 6073 - protein, 257 aa, Artificial Sequence
  source: /note="Description of Artificial Sequence: Synthetic single chain variable fragment"
EVQLVQSGAEVKKPGASVKVSCKASGYSFPSSGLSWVRQAPGQGPEWMGWIGIYNGNTDYAQKFQGRVTMTTDKSTSTAYMELRSLRSDDTAVYYCARDSVGSISVAGTMQYYYFAMDVWGQGTLVTVSSGGGGSGGGGSGGGGSAQSVLTQPPSASGSPGQSVTISCAGTRYDIGTYNYVSWYQQHPAKGPKLIIYAVSERPSGVPNRFSGSKSGNTASLTVSGLRAEDEAHYYCSSYAGNNNVIFGGGTKVTVLG

SEQ ID NO: 6074 - protein, 247 aa, Artificial Sequence
  source: /note="Description of Artificial Sequence: Synthetic single chain variable fragment"
QVQLQESGPGLVKPSGTLSLTCAVSGGSISTSDWWSWVRRPPGKGLEWIGEIYHSGSTNYHPSLKSRVTISLDKSKNQFSLKLSSVTAADTAVYYCAREGGHSGSYPLDYWGRGTMVTVSSGGGGSGGGGSGGGGSAQSVLTQPPSASGTPGQRVTISCSGSFSNIGGNYVNWYQQLPGTAPKLLIYGNNQRPSGVPDRFSSFKSGTSASLAISGLRSEDEADYYCATWDDSQTVLFGGGTKLTVLG

SEQ ID NO: 6075 - protein, 251 aa, Artificial Sequence
  source: /note="Description of Artificial Sequence: Synthetic single chain variable fragment"
QLQLQESGPGLVKPSGTLSLTCAVSGGSISTSDWWSWVRRPPGKGLEWIGEIYHSGSTNYHPSLKSRVTISLDKSKNQFSLKLSSVTAADTAVYYCAREGGHSGSYPLDYWGKGTLVTVSSGGGGSGGGGSGGGGSALNFMLTQPHSVSESPGKTVTISCTRSSGSIASNYVQWYQQRPGSSPTTVIYEDNQRPSGVPDRFSGSIDSSSNSASLTISGLKTEDEADYYCQSYDSSNPYVVFGGGTKLTVLG

SEQ ID NO: 6076 - protein, 251 aa, Artificial Sequence
  source: /note="Description of Artificial Sequence: Synthetic single chain variable fragment"
QVQLQESGPGLVKPSGTLSLTCAVSGGSISTSDWWSWVRRPPGKGLEWIGEIYHSGSTNYHPSLKSRVTISLDKSKNQFSLKLSSVTAADTAVYYCAREGGHSGSYPLDYWGQGTLVTVSSGGGGSGGGGSGGGGSALNFMLTQPHSVSGSPGRTVTISCTRSSGSIATNYVQWYQQRPGSSPTIVIYEDNQRPSGVPDRFSGSIDTSSNSASLTISGLKTEDEADYYCQSYDSNNLGVVFGGGTQLTVLS

SEQ ID NO: 6077 - protein, 244 aa, Artificial Sequence
  source: /note="Description of Artificial Sequence: Synthetic single chain variable fragment"
QVQLQQSGAEVRKPGASAKVSCKTSGYTFIDYYIHWVRQAPGQGLEWMGWINPVTGASGSSPNFRGRVTLTTDTSGNTAYMELRSLRSDDTAVFYCARRHQQSLDYWGRGTTVTVSSGGGGSGGGGSGGGGSAQSVVTQPPSVSAAPGQKVTISCSGRTSNIGNNYVSWYQQVPGAPPKLLIFDNNKRPSGTPARFSGSKSGTSATLAISGLQTGDEADYYCGTWDTTLRGFVFGPGTKVTVLG

SEQ ID NO: 6078 - protein, 248 aa, Artificial Sequence
  source: /note="Description of Artificial Sequence: Synthetic single chain variable fragment"
QLQLQESGPGLVKPSGTLSLTCAVSGGSISTSDWWSWVRRPPGKGLEWIGEIYHSGSTNYHPSLKSRVTISLDKSKNQFSLKLSSVTAADTAVYYCAREGGHSGSYPLDYWGQGTLVTVSSGGGGSGGGGSGGGGSAQSVVTQPPSVSAAPGQKVTISCSGSSSNIGNNYVSWYKQLPGTAPKLLIYDNNKRPSGIPDRFSGSKSGTSATLGITGLQTGDEADYYCGTWDSSLSGVVFGGGTKLTVLG

SEQ ID NO: 6079 - protein, 251 aa, Artificial Sequence
  source: /note="Description of Artificial Sequence: Synthetic single chain variable fragment"
QLQLQESGPGLVKPSGTLSLTCAVSGGSISTSDWWSWVRRPPGKGLEWIGEIYHSGSTNYHPSLKSRVTISLDKSKNQFSLKLSSVTAADTAVYYCAREGGHSGSYPLDYWGRGTLVTVSSGGGGSGGGGSGGGGSALNFMLTQPHSVSESPGKTVTISCTRSSGSIASNYVQWYQQRPGSSPTTLIYDDNQRPSGVPDRFSGSIDSSSNSASLTISGLKTEDEADYYCQSYDSSNLGVVFGGGTKLTVLG

SEQ ID NO: 6080 - protein, 250 aa, Artificial Sequence
  source: /note="Description of Artificial Sequence: Synthetic single chain variable fragment"
QVQLQESGPGLVKPSGTLSLTCAVSGGSISTSDWWSWVRRPPGKGLEWIGEIYHSGSTNYHPSLKSRVTISLDKSKNQFSLKLSSVTAADTAVYYCAREGGHSGSYPLDYWGRGTLVTVSSGGGGSGGGGSGGGGSALNFMLTQPHSVSESPGKTATISCTGSGGSIARSYVQWYQQRPGRAPSIVIYEDYQRPSGVPDRFSGSIDSSSNSASLTITGLKTDDEADYYCQSSDDNNNVVFGGGTKVTVLG

SEQ ID NO: 6081 - protein, 248 aa, Artificial Sequence
  source: /note="Description of Artificial Sequence: Synthetic single chain variable fragment"
QVQLQESGPGLVKPSGTLSLTCAVSGGSISTSDWWSWVRRPPGKGLEWIGEIYHSGSTNYHPSLKSRVTISLDKSKNQFSLKLSSVTAADTAVYYCAREGGHSGSYPLDYWGRGTLVTVSSGGGGSGGGGSGGGGSAQAVLTQPSSVSAAPGQKVTISCSGSSSNIGNNYVSWYQQLPGTAPKLLIYDNNERPSGIPDRFSGSKSGTSATLGITGLQTGDEADYYCGTWDSSLSTVVFGTGTKVTVLG

SEQ ID NO: 6082 - protein, 249 aa, Artificial Sequence
  source: /note="Description of Artificial Sequence: Synthetic single chain variable fragment"
QLQLQESGPGLVKPSGTLSLTCAVSGGSISTSDWWSWVRRPPGKGLEWIGEIYHSGSTNYHPSLKSRVTISLDKSKNQFSLKLSSVTAADTAVYYCAREGGHSGSYPLDYWGQGTLVTVSSGGGGSGGGGSGGGGSALNFMLTQPHSVSESPGKTVTVSCTGSGGNIASNYVQWYQQRPDSAPTLVIFEDTQRPSGVPARFSGSIDSSSNSASLIISSLRTEDEADYYCQSSDSNRVVFGGGTKVTVLG

SEQ ID NO: 6083 - protein, 241 aa, Artificial Sequence
  source: /note="Description of Artificial Sequence: Synthetic single chain variable fragment"
QVQLQESGPGLVKPSETLSLTCNVSGGSIRNYFWSWIRQPPGQGLEYIGYIYYSGTTDYNPSLKGRVTISLDTSKTQFSLKLNSVTAADTAFYYCVRGPNKYAFDPWGQGTLVTVSSGGGGSGGGGSGGGGSALSYELTQPPSVSVSPGQTASITCSGDKLGDKFASWYQQKAGQSPVLVIYRDTKRPSGIPERFSGSNSGNTATLTISGTQAMDEADYYCQAWDSSTAVFGTGTKVTVLG

SEQ ID NO: 6084 - protein, 251 aa, Artificial Sequence
  source: /note="Description of Artificial Sequence: Synthetic single chain variable fragment"
QLQLQESGPGLVKPSGTLSLTCAVSGGSISTSDWWSWVRRPPGKGLEWIGEIYHSGSTNYHPSLKSRVTISLDKSKNQFSLKLSSVTAADTAVYYCAREGGHSGSYPLDYWGQGTLVTVSSGGGGSGGGGSGGGGSALNFMLTQPHSVSESPGKTVTISCTRSSGSIDNNYVQWYQQRPGSSPTTVIFEDNQRPSGVPDRFSGSIDSSSNSASLTISGLKTEDEADYYCQSYDSHNQGVVFGGGTKLTVLG

SEQ ID NO: 6085 - protein, 248 aa, Artificial Sequence
  source: /note="Description of Artificial Sequence: Synthetic single chain variable fragment"
QLQLQESGPGLVKPSGTLSLTCAVSGGSISTSDWWSWVRRPPGKGLEWIGEIYHSGSTNYHPSLKSRVTISLDKSKNQFSLKLSSVTAADTAVYYCAREGGHSGSYPLDYWGRGTLVTVSSGGGGSGGGGSGGGGSAQSVLTQPPSVSAAPGQKVTISCSGSSSNIGNSYVSWYKQLPGTAPKVLIYDNQKRSSGIPDRFSASKSGTSATLGITGLRTEDEADYYCGTWDTSLSAVVFGGGTKLTVLG

SEQ ID NO: 6086 - protein, 248 aa, Artificial Sequence
  source: /note="Description of Artificial Sequence: Synthetic single chain variable fragment"
EVQLVESGPGLVKPSGTLSLTCAVSGGSISTSDWWSWVRRPPGKGLEWIGEIYHSGSTNYHPSLKSRVTISLDKSKNQFSLKLSSVTAADTAVYYCAREGGHSGSYPLDYWGRGTLVTVSSGGGGSGGGGSGGGGSAQSVVTQPPSVSAAPGQKVTISCSGNFSNIEYNYVSWYQHLPGTAPKLLIFDNNQRPSWIPDRFSGSKSGTSATLGITGLQTGDEADYYCGTWDSSLNAGVFGGGTKVTVLG

SEQ ID NO: 6087 - protein, 250 aa, Artificial Sequence
  source: /note="Description of Artificial Sequence: Synthetic single chain variable fragment"
QLQLQESGPGLVKPSGTLSLTCAVSGGSISSTNWWSWVRQPPGKGLEWIGEIYHSGSTNYNPSLKSRVTISVDKSKNHFSLNLSSVTAADTAVYYCARDSMGSTGWHYGMDLWGRGTLVTVSSGGGGSGGGGSGGGGSAQSALTQPPSASGSPGQSVTISCSGSSSDIGDYNHVSWYQQHPGKAPKLMIYDVNKWPSGVPDRFSGSKSGNTASLTVSGLQAEDEADYYCSSYSGIYNLVFGGGTKVTVLG

SEQ ID NO: 6088 - protein, 250 aa, Artificial Sequence
  source: /note="Description of Artificial Sequence: Synthetic single chain variable fragment"
QLQLQESGPGLVKPSGTLSLTCAVSGGSISTSDWWSWVRRPPGKGLEWIGEIYHSGSTNYHPSLKSRVTISLDKSKNQFSLKLSSVTAADTAVYYCAREGGHSGSYPLDYWGRGTLVTVSSGGGGSGGGGSGGGGSALNFMLTQPHSVSESPGKTVTISCARSSGSIASNYVQWYQQRPGSSPTTLIYEDRQRPSGVPDRFSGSIDSSSNSASLTISGLKTEDEADYYCQSYDSSDHVVFGGGTKLTVLG

SEQ ID NO: 6089 - protein, 251 aa, Artificial Sequence
  source: /note="Description of Artificial Sequence: Synthetic single chain variable fragment"
EVQLVQSGAEVKKPGSSVKVSCKASGGTFKTYAINWVRQAPGQGLEWMGGIIPVLGTANYVQKFQGRVTITADESTTTAYMELRGLRSEDTAVYYCARGEGSGWYDHYYGLDVWGQGTLVTVSSGGGGSGGGGSGGGGSAQSVLTQPPSASGTPGQRVTISCSGSSSNIGSNTVNWYRQLPGTAPKLLIFGDDQRPSGVPDRFSGSRSGTSVSLAISGLQSEDEADYYCAAWDDSLNGGVFGGGTKLTVLG

SEQ ID NO: 6090 - protein, 242 aa, Artificial Sequence
  source: /note="Description of Artificial Sequence: Synthetic single chain variable fragment"
KVQLLESGGGLVQPGGSLRLSCAASGFTFSSYAMSWVRQAPGKGLEWVSAISGSGGSTYYADSVKGRFTISRDNSKNTLYLQMNSLRAEDTAVYYCAKDDVRNAFDIWGRGTTVTVSSGGGGSGGGGSGGGGSAQSVLTQPPSVSVSPGQTTSITCSRDKLGEQYVYWYQQRPGQSPILLLYQDSRRPSWIPERFSGSNSGDTATLTISGTQALDEADYYCQAWDNSSYVAFGGGTKVTVLG

SEQ ID NO: 6091 - protein, 250 aa, Artificial Sequence
  source: /note="Description of Artificial Sequence: Synthetic single chain variable fragment"
QVQLQESGPGLVKPSGTLSLTCAVSGGSISSTNWWSWVRQPPGKGLEWIGEIYHSGSTNYNPSLKSRVTISVDKSKNHFSLNLSSVTAADTAVYYCARDSMGSTGWHYGMDLWGRGTLVTVSSGGGGSGGGGSGGGGSAQSALTQPAAVSGSPGQSITISCTGSSSDVGGYNYVSWYQQHPGKAPKLLIYDVSDRPSGVSYRFSGSKSGNTASLTISGLQAEDEADYYCSSYTATGTLVFGGGTKLTVLG

SEQ ID NO: 6092 - protein, 243 aa, Artificial Sequence
  source: /note="Description of Artificial Sequence: Synthetic single chain variable fragment"
EVQLVESGGGLVQPGGSLRLSCAASGFDFSRYWMSWVRQAPGKGLEWIGEINPDSSTINYAPSLKDKFIISRDNAKSLYLQMNSLRAEDTAVYYCARPDGNYWYFDVWGQGTLVTVSSGSTSGGGSGGGSGGGGSSDIQMTQSPSSLSASVGDRVTITCKASQDVGIAVAWYQQKPGKVPKLLIYWASTRHTGVPDRFSGSGSGTDFTLTISSLQPEDVATYYCQQYSSYPYTFGQGTKVEIK

SEQ ID NO: 6093 - protein, 242 aa, Artificial Sequence; identical to SEQ ID NO: 5998
  source: /note="Description of Artificial Sequence: Synthetic single chain variable fragment"

SEQ ID NO: 6094 - protein, 259 aa, Artificial Sequence
  source: /note="Description of Artificial Sequence: Synthetic single chain variable fragment"
MEFGLSWLFLVAILKGVQCSRMAQVKLKESGPELKKPGETVKISCKASGYTFTDYSMHWVKKTPGKGLKWLGWINTATGEPTYADDFKGRFAISLETSARTVYLQINNLRNEDTATYFCFSYYDYWGQGTTVTVSSGGGGSGGGGSGGGGLDIKLTQSPSILSVTPGETVSLSCRASQTIYKNLHWYQQKSHRSPRLLIKYGSDSISGIPSRFTGSGSGTDYTLNINSVKPEDEGIYYCLQGYSTPWTFGGGTKLEIKR

SEQ ID NO: 6095 - protein, 259 aa, Artificial Sequence; identical to SEQ ID NO: 6094
  source: /note="Description of Artificial Sequence: Synthetic single chain variable fragment"

SEQ ID NO: 6096 - protein, 450 aa, Artificial Sequence
  source: /note="Description of Artificial Sequence: Synthetic single chain variable fragment"
EVQLVESGGGLVQPGRSLRLSCTASGFTFTDNYMSWVRQAPGKGLEWVGFIRNKANGYTTEYAASVKGRFTISRDDSKSIAYLQMNSLKTEDTAVYYCARDVGSNYFDYWGQGTLVTVSSASTKGPSVFPLAPSSKSTSGGTAALGCLVKDYFPEPVTVSWNSGALTSGVHTFPAVLQSSGLYSLSSVVTVPSSSLGTQTYICNVNHKPSNTKVDKRVEPKSCDKTHTCPPCPAPELLGGPSVFLFPPKPKDTLMISRTPEVTCVVVDVSHEDPEVKFNWYVDGVEVHNAKTKPREEQYNSTYRVVSVLTVLHQDWLNGKEYKCKVSNKALPAPIEKTISKAKGQPREPQVYTLPPSREEMTKNQVSLTCLVKGFYPSDIAVEWESNGQPENNYKTTPPVLDSDGSFFLYSKLTVDKSRWQQGNVFSCSVMHEALHNHYTQKSLSLSPGK

SEQ ID NO: 6097 - protein, 450 aa, Artificial Sequence
  source: /note="Description of Artificial Sequence: Synthetic single chain variable fragment"
EVQLVESGGGLVQPGRSLRLSCTASGFTFTDNYMSWVRQAPGKGLEWLGFIRNKANGYTTEYAASVKGRFTISRDNSKSIAYLQMNSLKTEDTAVYYCARDVGSNYFDYWGQGTLVTVSSASTKGPSVFPLAPSSKSTSGGTAALGCLVKDYFPEPVTVSWNSGALTSGVHTFPAVLQSSGLYSLSSVVTVPSSSLGTQTYICNVNHKPSNTKVDKRVEPKSCDKTHTCPPCPAPELLGGPSVFLFPPKPKDTLMISRTPEVTCVVVDVSHEDPEVKFNWYVDGVEVHNAKTKPREEQYNSTYRVVSVLTVLHQDWLNGKEYKCKVSNKALPAPIEKTISKAKGQPREPQVYTLPPSREEMTKNQVSLTCLVKGFYPSDIAVEWESNGQPENNYKTTPPVLDSDGSFFLYSKLTVDKSRWQQGNVFSCSVMHEALHNHYTQKSLSLSPGK

SEQ ID NO: 6098 - protein, 450 aa, Artificial Sequence
  source: /note="Description of Artificial Sequence: Synthetic single chain variable fragment"
EVNLVESGGGLVQPGRSLRLSCTASGFTFTDNYMSWVRQAPGKGLEWLGFIRNKANGYTTDYAASVRGRFTISRDNSKSILYLQMNALRTEDTAVYYCARDVGSNYFDYWGQGTLVTVSSASTKGPSVFPLAPSSKSTSGGTAALGCLVKDYFPEPVTVSWNSGALTSGVHTFPAVLQSSGLYSLSSVVTVPSSSLGTQTYICNVNHKPSNTKVDKRVEPKSCDKTHTCPPCPAPELLGGPSVFLFPPKPKDTLMISRTPEVTCVVVDVSHEDPEVKFNWYVDGVEVHNAKTKPREEQYNSTYRVVSVLTVLHQDWLNGKEYKCKVSNKALPAPIEKTISKAKGQPREPQVYTLPPSREEMTKNQVSLTCLVKGFYPSDIAVEWESNGQPENNYKTTPPVLDSDGSFFLYSKLTVDKSRWQQGNVFSCSVMHEALHNHYTQKSLSLSPGK

SEQ ID NO: 6099 - protein, 219 aa, Artificial Sequence
  source: /note="Description of Artificial Sequence: Synthetic single chain variable fragment"
DIVMTQSPSSLAVSLGERATMSCKSSQSLFNSRTRKNYLAWYQQKPGQSPKLLIYWASARDSGVPARFTGSGSETYFTLTISRVQAEDLAVYYCMQSFNLRTFGQGTKVEIKRTVAAPSVFIFPPSDEQLKSGTASVVCLLNNFYPREAKVQWKVDNALQSGNSQESVTEQDSKDSTYSLSSTLTLSKADYEKHKVYACEVTHQGLSSPVTKSFNRGEC

SEQ ID NO: 6100 - protein, 250 aa, Artificial Sequence
  source: /note="Description of Artificial Sequence: Synthetic single chain variable fragment"
SYELTQPPSVSGTPGQRVAISCSGSSSNIGTRMVTWYQHVPGTAPKLLIFNNNQRPSGVPDRFSASKSGTSASLAIIGLQSDDEADYYCAAWDDNLKSYVFGTGTKVTVLGSRGGGGSGGGGSGGGGSLEMAQVQLQQWGAGLLKPSETLSLTCAVYGGSFSGYYWSWIRQPPGKGLEWIGEINHSGSTNYNPSLKSRVTISVDTSKNQFSLKLSSVTAADTAVYYCARAPQSWYRGDVWGQGTLVTVSS

SEQ ID NO: 6101 - protein, 250 aa, Artificial Sequence
  source: /note="Description of Artificial Sequence: Synthetic single chain variable fragment"
SYELTQPPSVSGTPGQRVAISCSGSSSNIGTRMVTWYQHVPGTAPKLLIFNNNQRPSGVPDRFSASKSGTSASLAIIGLQSDDEADYYCAAWDDNLKSYVFGTGTKVTVLGSRGGGGSGGGGSGGGGSLEMAQVQLQQWGAGLLKPSETLSLTCAVYGGSFSGYYWSWIRQPPGKGLEWIGEINHSGSTNYNPSLKSRVTISVDTSKNQFSLKLSSVTAADTAVYYCLRAPQSWYVGDVWGQGTLVTVSS

SEQ ID NO: 6102 - protein, 250 aa, Artificial Sequence
  source: /note="Description of Artificial Sequence: Synthetic single chain variable fragment"
SYELTQPPSVSGTPGQRVAISCSGSSSNIGTRMVTWYQHVPGTAPKLLIFNNNQRPSGVPDRFSASKSGTSASLAIIGLQSDDEADYYCAAWDDNLKSYVFGTGTKVTVLGSRGGGGSGGGGSGGGGSLEMAQVQLQQWGAGLLKPSETMSLTCAVYGGSFSGYYWSWIRQPPGKGLEWIGEINHSGSTNYNPSLKSRVTISVDTSKNQFSLKLSSVTAADTAVYYCARAPQSWYRGDVWGQGTLVTVSS

SEQ ID NO: 6103 - protein, 250 aa, Artificial Sequence
  source: /note="Description of Artificial Sequence: Synthetic single chain variable fragment"
SYELTQPPSVSGTPGQRVAISCSGSSSNIGTRMVTWYQHVPGTAPKLLIFNNNQRPSGVPDRFSASKSGTSASLAIIGLQSDDEADYYCATWDENPKSYVFGTGTKVTVLGSRGGGGSGGGGSGGGGSLEMAQVQLQQWGAGLLKPSETLSLTCAVYGGSFSGYYWSWIRQPPGKGLEWIGEINHSGSTNYNPSLKSRVTISVDTSKNQFSLKLSSVTAADTAVYYCARAPQSWYVGDVWGQGTLVTVSS

SEQ ID NO: 6104 - protein, 250 aa, Artificial Sequence
  source: /note="Description of Artificial Sequence: Synthetic single chain variable fragment"
SYELTQPPSVSGTPGQRVAISCSGSSSNIGTRMVTWYQHVPGTAPKLLIFNNNQRPSGVPDRFSASKSGTSASLAIIGLQSDDEADYYCATWEDNRKSYVFGTGTKVTVLGSRGGGGSGGGGSGGGGSLEMAQVQLQQWGAGLLKPSETLSLTCAVYGGSFSGYYWSWIRQPPGKGLEWIGEINHSGSTNYNPSLKSRVTISVDTSKNQFSLKLSSVTAADTAVYYCARAPQSWYVGDVWGQGTLVTVSS

SEQ ID NO: 6105 - protein, 250 aa, Artificial Sequence
  source: /note="Description of Artificial Sequence: Synthetic single chain variable fragment"
SYELTQPPSVSGTPGQRVAISCSGSSSNIGTRVVTWYQHVPGTAPKLLIFNNNQRPSGVPDRFSASKSGTSASLAIIGLQSDDEADYYCAAWDDNLKSYVFGTGTKVTVLGSRGGGGSGGGGSGGGGSLEMAQVQLQQWGAGLLKPSETLSLTCAVYGGSFSGYYWSWIRQPPGKGLEWIGEINHSGSTNYNPSLKSRVTISVDTSKNQFSLKLSSVTAADTAVYYCARAPQSWYVGDVWGQGTLVTVSS

SEQ ID NO: 6106 - protein, 250 aa, Artificial Sequence
  source: /note="Description of Artificial Sequence: Synthetic single chain variable fragment"
SYELTQPPSVSGTPGQRVAISCSGSSSNIGTRMVTWYQHVPGTAPKLLIFNNNQRPSGVPDRFSASKSGTSASLAIIGLQSDDEADYYCATWDDNVKSYVFGTGTKVTVLGSRGGGGSGGGGSGGGGSLEMAQVQLQQWGAGLLKPSETLSLTCAVYGGSFSGYYWSWIRQPPGKGLEWIGEINHSGSTNYNPSLKSRVTISVDTSKNQFSLKLSSVTAADTAVYYCARAPQSWYVGDVWGQGTLVTVSS

SEQ ID NO: 6107 - protein, 250 aa, Artificial Sequence
  source: /note="Description of Artificial Sequence: Synthetic single chain variable fragment"
SYELTQPPSVSGTPGQRVAISCSGSSSNIGTRMVTWYQHVPGTAPKLLIFNNNQRPSGVPDRFSASKSGTSASLAIIGLQSDDEADYYCAAWDDNPKSYHFGTGTKVTVLGSRGGGGSGGGGSGGGGSLEMAQVQLQQWGAGLLKPSETLSLTCAVYGGSFSGYYWSWIRQPPGKGLEWIGEINHSGSTNYNPSLKSRVTISVDTSKNQFSLKLSSVTAADTAVYYCARAPQSWYVGDVWGQGTLVTVSS

SEQ ID NO: 6108 - protein, 250 aa, Artificial Sequence
  source: /note="Description of Artificial Sequence: Synthetic single chain variable fragment"
SYELTQPPSVSGTPGQRVAISCSGSSSNIGTRMVTWYQHVPGTAPKLLIFNNNQRPSGVPDRFSASKSGTSASLTIIGLQSDDEADYYCAAWDDNLKSYVFGTGTKVTVLGSRGGGGSGGGGSGGGGSLEMAQVQLQQWGAGLLKPSETLSLTCAVYGGSFSGYYWSWIRQPPGKGLEWIGEINHSGSTNYNPSLKSRVTMSVDTSKRQFSLKLSSVTAADTAVYYCARAPQSWYVGDVWGQGTLVTVSS

SEQ ID NO: 6109 - protein, 250 aa, Artificial Sequence
  source: /note="Description of Artificial Sequence: Synthetic single chain variable fragment"
SYELTQPPSVSGTPGQRVAISCSGSSSNIGTRMVTWYQHVPGTAPKLLIFNNNQRPSGVPDRFSASKSGTSASLAIIGLQSDDEADYYCAAWDDNLKSYVFGTGTKVTVLGSRGGGGSGGGGSDGGGSLEMAQVQLQQWGAGLLKPSETLSLTCAVYGGSFSGYYWSWIRQLPGKGLEWIGEINHSGSTNYNPYLKSRVTISVDTSKRQFSLKLSSVTAADTAVYYCARAPQSWYVGDVWGQGTLVTVSS

SEQ ID NO: 6110 - protein, 227 aa, Artificial Sequence
  source: /note="Description of Artificial Sequence: Synthetic single chain variable fragment"
SVKLSCTGSGFNIEDYYIHWVKQRTEQGLEWIGRIDPENDETKYGPIFQGRATITADTSSNTVYLQLSSLTSEDTAVYYCAFRGGVYWGPGTTLTVSSGGGGSGGGGSGGGGSHMDVVMTQSPLTLSVAIGQSASISCKSSQSLLDSDGKTYLNWLLQRPGQSPKRLISLVSKLDSGVPDRFTGSGSGTDFTLRISRVEAEDLGIYYCWQGTHFPGTFGGGTKLEIK

SEQ ID NO: 6111 - protein, 246 aa, Artificial Sequence
  source: /note="Description of Artificial Sequence: Synthetic single chain variable fragment"
EIQLVQSGAEVKKPGATVKISCKGSGFNIEDYYIHWVQQAPGKGLEWMGRIDPENDETKYGPIFQGRVTITADTSTNTVYMELSSLRSEDTAVYYCAFRGGVYWGQGTTVTVSSGGGGSGGGGSGGGGSGGGGSDVVMTQSPDSLAVSLGERATINCKSSQSLLDSDGKTYLNWLQQKPGQPPKRLISLVSKLDSGVPDRFSGSGSGTDFTLTISSLQAEDVAVYYCWQGTHFPGTFGGGTKVEIK

SEQ ID NO: 6112 - protein, 277 aa, Artificial Sequence
  source: /note="Description of Artificial Sequence: Synthetic single chain variable fragment"
MALPVTALLLPLALLLHAARPEIQLVQSGAEVKKPGATVKISCKGSGFNIEDYYIHWVQQAPGKGLEWMGRIDPENDETKYGPIFQGRVTITADTSTNTVYMELSSLRSEDTAVYYCAFRGGVYWGQGTTVTVSSGGGGSGGGGSGGGGSGGGGSDVVMTQSPDSLAVSLGERATINCKSSQSLLDSDGKTYLNWLQQKPGQPPKRLISLVSKLDSGVPDRFSGSGSGTDFTLTISSLQAEDVAVYYCWQGTHFPGTFGGGTKVEIKGSHHHHHHHH

SEQ ID NO: 6113 - protein, 246 aa, Artificial Sequence
  source: /note="Description of Artificial Sequence: Synthetic single chain variable fragment"
DVVMTQSPDSLAVSLGERATINCKSSQSLLDSDGKTYLNWLQQKPGQPPKRLISLVSKLDSGVPDRFSGSGSGTDFTLTISSLQAEDVAVYYCWQGTHFPGTFGGGTKVEIKGGGGSGGGGSGGGGSGGGGSEIQLVQSGAEVKKPGATVKISCKGSGFNIEDYYIHWVQQAPGKGLEWMGRIDPENDETKYGPIFQGRVTITADTSTNTVYMELSSLRSEDTAVYYCAFRGGVYWGQGTTVTVSS

SEQ ID NO: 6114 - protein, 261 aa, Artificial Sequence
  source: /note="Description of Artificial Sequence: Synthetic single chain variable fragment"
HAARPDVVMTQSPDSLAVSLGERATINCKSSQSLLDSDGKTYLNWLQQKPGQPPKRLISLVSKLDSGVPDRFSGSGSGTDFTLTISSLQAEDVAVYYCWQGTHFPGTFGGGTKVEIKGGGGSGGGGSGGGGSGGGGSEIQLVQSGAEVKKPGATVKISCKGSGFNIEDYYIHWVQQAPGKGLEWMGRIDPENDETKYGPIFQGRVTITADTSTNTVYMELSSLRSEDTAVYYCAFRGGVYWGQGTTVTVSSGSHHHHHHHH

SEQ ID NO: 6115 - protein, 246 aa, Artificial Sequence
  source: /note="Description of Artificial Sequence: Synthetic single chain variable fragment"
EIQLVQSGAEVKKPGESLRISCKGSGFNIEDYYIHWVRQMPGKGLEWMGRIDPENDETKYGPIFQGHVTISADTSINTVYLQWSSLKASDTAMYYCAFRGGVYWGQGTTVTVSSGGGGSGGGGSGGGGSGGGGSDVVMTQSPLSLPVTLGQPASISCKSSQSLLDSDGKTYLNWLQQRPGQSPRRLISLVSKLDSGVPDRFSGSGSGTDFTLKISRVEAEDVGVYYCWQGTHFPGTFGGGTKVEIK

SEQ ID NO: 6116 - protein, 277 aa, Artificial Sequence
  source: /note="Description of Artificial Sequence: Synthetic single chain variable fragment"
MALPVTALLLPLALLLHAARPEIQLVQSGAEVKKPGESLRISCKGSGFNIEDYYIHWVRQMPGKGLEWMGRIDPENDETKYGPIFQGHVTISADTSINTVYLQWSSLKASDTAMYYCAFRGGVYWGQGTTVTVSSGGGGSGGGGSGGGGSGGGGSDVVMTQSPLSLPVTLGQPASISCKSSQSLLDSDGKTYLNWLQQRPGQSPRRLISLVSKLDSGVPDRFSGSGSGTDFTLKISRVEAEDVGVYYCWQGTHFPGTFGGGTKVEIKGSHHHHHHHH

SEQ ID NO: 6117 - protein, 246 aa, Artificial Sequence
  source: /note="Description of Artificial Sequence: Synthetic single chain variable fragment"
DVVMTQSPLSLPVTLGQPASISCKSSQSLLDSDGKTYLNWLQQRPGQSPRRLISLVSKLDSGVPDRFSGSGSGTDFTLKISRVEAEDVGVYYCWQGTHFPGTFGGGTKVEIKGGGGSGGGGSGGGGSGGGGSEIQLVQSGAEVKKPGESLRISCKGSGFNIEDYYIHWVRQMPGKGLEWMGRIDPENDETKYGPIFQGHVTISADTSINTVYLQWSSLKASDTAMYYCAFRGGVYWGQGTTVTVSS

SEQ ID NO: 6118 - protein, 277 aa, Artificial Sequence
  source: /note="Description of Artificial Sequence: Synthetic single chain variable fragment"
MALPVTALLLPLALLLHAARPDVVMTQSPLSLPVTLGQPASISCKSSQSLLDSDGKTYLNWLQQRPGQSPRRLISLVSKLDSGVPDRFSGSGSGTDFTLKISRVEAEDVGVYYCWQGTHFPGTFGGGTKVEIKGGGGSGGGGSGGGGSGGGGSEIQLVQSGAEVKKPGESLRISCKGSGFNIEDYYIHWVRQMPGKGLEWMGRIDPENDETKYGPIFQGHVTISADTSINTVYLQWSSLKASDTAMYYCAFRGGVYWGQGTTVTVSSGSHHHHHHHH

SEQ ID NO: 6119 - protein, 246 aa, Artificial Sequence
  source: /note="Description of Artificial Sequence: Synthetic single chain variable fragment"
EIQLVQSGAEVKKPGATVKISCKGSGFNIEDYYIHWVQQAPGKGLEWMGRIDPENDETKYGPIFQGRVTITADTSTNTVYMELSSLRSEDTAVYYCAFRGGVYWGQGTTVTVSSGGGGSGGGGSGGGGSGGGGSDVVMTQSPLSLPVTLGQPASISCKSSQSLLDSDGKTYLNWLQQRPGQSPRRLISLVSKLDSGVPDRFSGSGSGTDFTLKISRVEAEDVGVYYCWQGTHFPGTFGGGTKVEIK

SEQ ID NO: 6120 - protein, 277 aa, Artificial Sequence
  source: /note="Description of Artificial Sequence: Synthetic single chain variable fragment"
MALPVTALLLPLALLLHAARPEIQLVQSGAEVKKPGATVKISCKGSGFNIEDYYIHWVQQAPGKGLEWMGRIDPENDETKYGPIFQGRVTITADTSTNTVYMELSSLRSEDTAVYYCAFRGGVYWGQGTTVTVSSGGGGSGGGGSGGGGSGGGGSDVVMTQSPLSLPVTLGQPASISCKSSQSLLDSDGKTYLNWLQQRPGQSPRRLISLVSKLDSGVPDRFSGSGSGTDFTLKISRVEAEDVGVYYCWQGTHFPGTFGGGTKVEIKGSHHHHHHHH

SEQ ID NO: 6121 - protein, 246 aa, Artificial Sequence
  source: /note="Description of Artificial Sequence: Synthetic single chain variable fragment"
EIQLVQSGAEVKKPGESLRISCKGSGFNIEDYYIHWVRQMPGKGLEWMGRIDPENDETKYGPIFQGHVTISADTSINTVYLQWSSLKASDTAMYYCAFRGGVYWGQGTTVTVSSGGGGSGGGGSGGGGSGGGGSDVVMTQSPDSLAVSLGERATINCKSSQSLLDSDGKTYLNWLQQKPGQPPKRLISLVSKLDSGVPDRFSGSGSGTDFTLTISSLQAEDVAVYYCWQGTHFPGTFGGGTKVEIK

SEQ ID NO: 6122 - protein, 278 aa, Artificial Sequence
  source: /note="Description of Artificial Sequence: Synthetic single chain variable fragment"
MALPVTALLLPLALLLHAARPEIQLVQSGAEVKKPGESLRISCKGSGFNIEDYYIHWVRQMPGKGLEWMGRIDPENDETKYGPIFQGHVTISADTSINTVYLQWSSLKASDTAMYYCAFRGGVYWGQGTTVTVSSGGGGSGGGGSGGGGSGGGGSDVVMTQSPDSLAVSLGERATINCKSSQSLLDSDGKTYLNWLQQKPGQPPKRLISLVSKLDSGVPDRFSGSGSGTDFTLTISSLQAEDVAVYYCWQGTHFPGTFGGGTKVEIKGSHHHHHHHHH

SEQ ID NO: 6123 - protein, 246 aa, Artificial Sequence
  source: /note="Description of Artificial Sequence: Synthetic single chain variable fragment"
DVVMTQSPDSLAVSLGERATINCKSSQSLLDSDGKTYLNWLQQKPGQPPKRLISLVSKLDSGVPDRFSGSGSGTDFTLTISSLQAEDVAVYYCWQGTHFPGTFGGGTKVEIKGGGGSGGGGSGGGGSGGGGSEIQLVQSGAEVKKPGESLRISCKGSGFNIEDYYIHWVRQMPGKGLEWMGRIDPENDETKYGPIFQGHVTISADTSINTVYLQWSSLKASDTAMYYCAFRGGVYWGQGTTVTVSS

SEQ ID NO: 6124 - protein, 278 aa, Artificial Sequence
  source: /note="Description of Artificial Sequence: Synthetic single chain variable fragment"
MALPVTALLLPLALLLHAARPDVVMTQSPDSLAVSLGERATINCKSSQSLLDSDGKTYLNWLQQKPGQPPKRLISLVSKLDSGVPDRFSGSGSGTDFTLTISSLQAEDVAVYYCWQGTHFPGTFGGGTKVEIKGGGGSGGGGSGGGGSGGGGSEIQLVQSGAEVKKPGESLRISCKGSGFNIEDYYIHWVRQMPGKGLEWMGRIDPENDETKYGPIFQGHVTISADTSINTVYLQWSSLKASDTAMYYCAFRGGVYWGQGTTVTVSSGSHHHHHHHHH

SEQ ID NO: 6125 - protein, 246 aa, Artificial Sequence
  source: /note="Description of Artificial Sequence: Synthetic single chain variable fragment"
DVVMTQSPLSLPVTLGQPASISCKSSQSLLDSDGKTYLNWLQQRPGQSPRRLISLVSKLDSGVPDRFSGSGSGTDFTLKISRVEAEDVGVYYCWQGTHFPGTFGGGTKVEIKGGGGSGGGGSGGGGSGGGGSEIQLVQSGAEVKKPGATVKISCKGSGFNIEDYYIHWVQQAPGKGLEWMGRIDPENDETKYGPIFQGRVTITADTSTNTVYMELSSLRSEDTAVYYCAFRGGVYWGQGTTVTVSS

SEQ ID NO: 6126 - protein, 277 aa, Artificial Sequence
  source: /note="Description of Artificial Sequence: Synthetic single chain variable fragment"
MALPVTALLLPLALLLHAARPDVVMTQSPLSLPVTLGQPASISCKSSQSLLDSDGKTYLNWLQQRPGQSPRRLISLVSKLDSGVPDRFSGSGSGTDFTLKISRVEAEDVGVYYCWQGTHFPGTFGGGTKVEIKGGGGSGGGGSGGGGSGGGGSEIQLVQSGAEVKKPGATVKISCKGSGFNIEDYYIHWVQQAPGKGLEWMGRIDPENDETKYGPIFQGRVTITADTSTNTVYMELSSLRSEDTAVYYCAFRGGVYWGQGTTVTVSSGSHHHHHHHH

SEQ ID NO: 6127 - protein, 274 aa, Artificial Sequence
  source: /note="Description of Artificial Sequence: Synthetic single chain variable fragment"
MALPVTALLLPLALLLHAARPEIQLQQSGAELVKPGASVKLSCTGSGFNIEDYYIHWVKQRTEQGLEWIGRIDPENDETKYGPIFQGRATITADTSSNTVYLQLSSLTSEDTAVYYCAFRGGVYWGPGTTLTVSSGGGGSGGGGSGGGGSHMDVVMTQSPLTLSVAIGQSASISCKSSQSLLDSDGKTYLNWLLQRPGQSPKRLISLVSKLDSGVPDRFTGSGSGTDFTLRISRVEAEDLGIYYCWQGTHFPGTFGGGTKLEIKGSHHHHHHHH

SEQ ID NO: 6128 - protein, 240 aa, Artificial Sequence
  source: /note="Description of Artificial Sequence: Synthetic single chain variable fragment"
DIQMTQSPSSLSASVGDRVTITCRASQGIRNNLAWYQQKPGKAPKRLIYAASNLQSGVPSRFTGSGSGTEFTLIVSSLQPEDFATYYCLQHHSYPLTSGGGTKVEIKRTGSTSGSGKPGSGEGSEVQVLESGGGLVQPGGSLRLSCAASGFTFSSYAMSWVRQAPGKGLEWVSAISGSGGSTNYADSVKGRFTISRDNSKNTLYLQMNSLRAEDTAVYYCAGSSGWSEYWGQGTLVTVSS

SEQ ID NO: 6129 - protein, 269 aa, Artificial Sequence
  source: /note="Description of Artificial Sequence: Synthetic single chain variable fragment"
MALPVTALLLPLALLLHAARPDIQMTQSPSSLSASVGDRVTITCRASQGIRNNLAWYQQKPGKAPKRLIYAASNLQSGVPSRFTGSGSGTEFTLIVSSLQPEDFATYYCLQHHSYPLTSGGGTKVEIKRTGSTSGSGKPGSGEGSEVQVLESGGGLVQPGGSLRLSCAASGFTFSSYAMSWVRQAPGKGLEWVSAISGSGGSTNYADSVKGRFTISRDNSKNTLYLQMNSLRAEDTAVYYCAGSSGWSEYWGQGTLVTVSSHHHHHHHH

SEQ ID NO: 6130 - protein, 249 aa, Artificial Sequence
  source: /note="Description of Artificial Sequence: Synthetic single chain variable fragment"
SYELTQPPSVSVAPGQTARITCSGDALGDKYASWYQQKPGQAPVLVIYEDSKRPSGIPERFSGSNSGNTATLTISGTQAEDEADYYCSVWDGDWGMPVFGGGTKLTVLGSGGSTITSYNVYYTKLSSSGSEVQLVQSGAEVKKPGESLKISCKGSGYSFTSYWIGWVRQMPGKGLEWMGIIYPGDSDTRYSPSFQGQVTISADKSISTAYLQWSSLKASDTAMYYCARGIIYPSNVAVWGQGTLVTVSS

SEQ ID NO: 6131 - protein, 126 aa, Artificial Sequence
  source: /note="Description of Artificial Sequence: Synthetic single chain variable fragment"
EAQLVQSGAEGKKPGSSVKVSCKAPGGTFNSYAISWVRQAPGQGLEWMGGIIPIFGTAYYAQKFQGRVTITADESTSTAYMELSSLRSEDTAVYYCAREEGPYCSSTSCYAAFDIWGRGTLVTVSS

SEQ ID NO: 6132 - protein, 126 aa, Artificial Sequence
  source: /note="Description of Artificial Sequence: Synthetic single chain variable fragment"
EAQLVQSGAEGKKPGSSVKVSCKAPGGTFNSYAISWVRQAPGQGLEWMGGIIPIFGTAYYAQKFQGRVTITADESTSTAYMELSSLRSEDTAVYYCAREEGPYCSSTSCYGAFDIWGRGTLVTVSS

SEQ ID NO: 6133 - protein, 126 aa, Artificial Sequence
  source: /note="Description of Artificial Sequence: Synthetic single chain variable fragment"
EVQLVQSGAEVKKPGSSVKVSCKASGGTFSSYAIGWVRQAPGQGLEWMGGIIPIFGIANYAQKFQGRVTITADESTSSAYMELSSLRSEDTAVYYCAREEGPYCSSTSCYAAFDIWGQGTLVTVSS

SEQ ID NO: 6134 - protein, 126 aa, Artificial Sequence
  source: /note="Description of Artificial Sequence: Synthetic single chain variable fragment"
EVQLVQSGAEVKKPGSSVKVSCKASGGTFSSYAIGWVRQAPGQGLEWMGGIIPIFGIANYAQKFQGRVTITADESTSSAYMELSSLRSEDTAVYYCAREEGPYCSSTSCYGAFDIWGQGTLVTVSS

SEQ ID NO: 6135 - protein, 126 aa, Artificial Sequence
  source: /note="Description of Artificial Sequence: Synthetic single chain variable fragment"
EVQLVQSGAEVKKPGSSVKVSCKASGGTFSSYAISWVRQAPGQGLEWMGGIIPIFGTANYAQKFQGRVTITADESTSTAYMELSSLRSEDTAVYYCAREEGPYCSSTSCYAAFDIWGQGTLVTVSS

SEQ ID NO: 6136 - protein, 126 aa, Artificial Sequence
  source: /note="Description of Artificial Sequence: Synthetic single chain variable fragment"
EVQLVQSGAEVKKPGSSVKVSCKASGGTFSSYAISWVRQAPGQGLEWMGGIIPIFGTANYAQKFQGRVTITADESTSTAYMELSSLRSEDTAVYYCAREEGPYCSSTSCYGAFDIWGQGTLVTVSS

SEQ ID NO: 6137 - protein, 126 aa, Artificial Sequence
  source: /note="Description of Artificial Sequence: Synthetic single chain variable fragment"
EVQLVQSGAEVKKPGSSVKVSCKASGGTFSSYAISWVRQAPGQGLEWVGGIIPIFGTANYAQKFQGRVKITADESASTAYMELSSLRSEDTAVYYCAREEGPYCSSTSCYAAFDIWGQGTLVTVSS

SEQ ID NO: 6138 - protein, 126 aa, Artificial Sequence
  source: /note="Description of Artificial Sequence: Synthetic single chain variable fragment"
EVQLVQSGAEVKKPGSSVKVSCKASGGTFSSYAISWVRQAPGQGLEWVGGIIPIFGTANYAQKFQGRVKITADESASTAYMELSSLRSEDTAVYYCAREEGPYCSSTSCYGAFDIWGQGTLVTVSS

SEQ ID NO: 6139 - protein, 126 aa, Artificial Sequence
  source: /note="Description of Artificial Sequence: Synthetic single chain variable fragment"
EVQLVQSGAEVKKLGSSVKVSCKASGGTFSSYAISWVRQAPGQGLEWVGGIIPIFGTANYAQKFQGRVKITADESASTAYMELSSLRSEDTAVYYCAREEGPYCSSTSCYGAFDIWGQGTLVTVSS

SEQ ID NO: 6140 - protein, 108 aa, Artificial Sequence
  source: /note="Description of Artificial Sequence: Synthetic single chain variable fragment"
QSVLTQDPAASVALGQTVKITCQGDSLRSYFASWYQQKPGQAPTLVMYARNDRPAGVPDRFSGSKSGTSASLAISGLQSEDEADYYCAAWDDSLNGYLFGAGTKLTVL

SEQ ID NO: 6141 - protein, 108 aa, Artificial Sequence
  source: /note="Description of Artificial Sequence: Synthetic single chain variable fragment"
QSVLTQDPAVSAALGQTVKITCQGDSLRSYFASWYQQKPGQAPTLVMYARNDRPAGVPDRFSGSKSGTSASLAISGLQSEDEADYYCAAWDDSLNGYLFGAGTKLTVL

SEQ ID NO: 6142 - protein, 108 aa, Artificial Sequence
  source: /note="Description of Artificial Sequence: Synthetic single chain variable fragment"
QSVLTQDPAVSVALGQTVKITCQGDSLRSYFASWYQQKPGQAPTLVMYARNDRPAGVPDRFSGSKSGTSASLAISGLQPEDEADYYCAAWDDSLNGYLFGAGTKLTVL

SEQ ID NO: 6143 - protein, 108 aa, Artificial Sequence
  source: /note="Description of Artificial Sequence: Synthetic single chain variable fragment"
QSVLTQDPAVSVALGQTVKITCQGDSLRSYFASWYQQKPGQAPTLVMYARNDRPAGVPDRFSGSKSGTSASLAISGLQSEDEADYYCAAWDDSLNGYLFGAGTKLTVL

SEQ ID NO: 6144 - protein, 108 aa, Artificial Sequence
  source: /note="Description of Artificial Sequence: Synthetic single chain variable fragment"
QSVLTQDPAVSVALGQTVKITCQGDSLRSYLASWYQQKPGQAPTLVTYARNDRPAGVPDRFSGSKSGTSASLAISGLQSEDEADYYCAAWDDSLNGYLFGAGTKLTVL

SEQ ID NO: 6145 - protein, 363 aa, Artificial Sequence
  source: /note="Description of Artificial Sequence: Synthetic single chain variable fragment"
MATGSRTSLLLAFGLLCLPWLQEGSAAPDVQDCPECTLQENPFFSQPGAPILQCMGCCFSRAYPTPLRSKKTMLVQKNVTSESTCCVAKSYNRVTVMGGFKVENHTACHCSTCGFSASPAFFQVQLKQSGPGLVQPSQSLSITCTVSGFSLTNYGVHWVRQSPGKGLEWLGVIWSGGNTDYNTPFTSRLSINKDNSKSQVFFKMNSLQSNDTAIYYCARALTYYDYEFAYWGQGTLVTVSAGGGGSGGGGSGGGGSDILLTQSPVILSVSPGERVSFSCRASQSIGTNIHWYQQRTNGSPRLLIKYASESISGIPSRFSGSGSGTDFTLSINSVESEDIADYYCQQNNNWPTTFGAGTKLELK

SEQ ID NO: 6146 - protein, 232 aa, Artificial Sequence
  source: /note="Description of Artificial Sequence: Synthetic single chain variable fragment"
MATGSRTSLLLAFGLLCLPWLQEGSAAPDVQDCPECTLQENPFFSQPGAPILQCMGCCFSRAYPTPLRSKKTMLVQKNVTSESTCCVAKSYNRVTVMGGFKVENHTACHCSTCQVQLKQSGPGLVQPSQSLSITCTVSGFSLTNYGVHWVRQSPGKGLEWLGVIWSGGNTDYNTPFTSRLSINKDNSKSQVFFKMNSLQSNDTAIYYCARALTYYDYEFAYWGQGTLVTVSA

SEQ ID NO: 6147 - protein, 353 aa, Artificial Sequence
  source: /note="Description of Artificial Sequence: Synthetic single chain variable fragment"
MATGSRTSLLLAFGLLCLPWLQEGSAAPDVQDCPECTLQENPFFSQPGAPILQCMGCCFSRAYPTPLRSKKTMLVQKNVTSESTCCVAKSYNRVTVMGGFKVENHTACHCSTCQVQLKQSGPGLVQPSQSLSITCTVSGFSLTNYGVHWVRQSPGKGLEWLGVIWSGGNTDYNTPFTSRLSINKDNSKSQVFFKMNSLQSNDTAIYYCARALTYYDYEFAYWGQGTLVTVSAGGGGSGGGGSGGGGSDILLTQSPVILSSPGERVSFSCRASQSIGTNIHWYQQRTNGSPRLLIKYASESISGIPSRFSGSGSGTDFTLSINSVESEDIADYYCQQNNNWPTTFGAGTKLELK

SEQ ID NO: 6148 - protein, 222 aa, Artificial Sequence
  source: /note="Description of Artificial Sequence: Synthetic single chain variable fragment"
MATGSRTSLLLAFGLLCLPWLQEGSADILLTQSPVILSVSPGERVSFSCRASQSIGTNIHWYQQRTNGSPRLLIKYASESISGIPSRFSGSGSGTDFTLSINSVESEDIADYYCQQNNNWPTTFGAGTKLELKAAAPDVQDCPECTLQENPFFSQPGAPILQCMGCCFSRAYPTPLRSKKTMLVQKNVTSESTCCVAKSYNRVTVMGGFKVENHTACHCSTC

SEQ ID NO: 6149 - protein, 616 aa, Artificial Sequence
  source: /note="Description of Artificial Sequence: Synthetic single chain variable fragment"
MATGSRTSLLLAFGLLCLPWLQEGSADIQMTQSPSSLSASVGDRVTITCITSNDIDDDMNWYQQKPGKAPKLLISEGNTLRPGVPSRFSGSGYGTDFTLTISSLQPEDVATYYCFQSDNLPYTFGQGTKVEIKGGGGSGGGGSGGGGSEVQLVQSGAEVKKPGASVKVSCKASGDTFTTYVIHWMRQAPGQGLEWIGYINPYNDGTKYNEKFKGRVTITSDKSTSTAYMELSSLRSEDTAVYYCARIYYDYDGDYWGQGTLVTVSSAAAPDVQDCPECTLQENPFFSQPGAPILQCMGCCFSRAYPTPLRSKKTMLVQKNVTSESTCCVAKSYNRVTVMGGFKVENHTACHCSTCGGGGSGGGGSGGGGSGGGGSQVQLKQSGPGLVQPSQSLSITCTVSGFSLTNYGVHWVRQSPGKGLEWLGVIWSGGNTDYNTPFTSRLSINKDNSKSQVFFKMNSLQSNDTAIYYCARALTYYDYEFAYWGQGTLVTVSAGGGGSGGGGSGGGGSDILLTQSPVILSVSPGERVSFSCRASQSIGTNIHWYQQRTNGSPRLLIKYASESISGIPSRFSGSGSGTDFTLSINSVESEDIADYYCQQNNNWPTTFGAGTKLELK

SEQ ID NO: 6150 - protein, 658 aa, Artificial Sequence
  source: /note="Description of Artificial Sequence: Synthetic single chain variable fragment"
MATGSRTSLLLAFGLLCLPWLQEGSAEVQLVESGGGLVQPGGSLRLSCAASGYTFTNYGMNWVRQAPGKGLEWVGWINTYTGEPTYAADFKRRFTFSLDTSKSTAYLQMNSLRAEDTAVYYCAKYPHYYGSSHWYFDVWGQGTLVTVSSGGGGSGGGGSGGGGSDIQMTQSPSSLSASVGDRVTITCSASQDISNYLNWYQQKPGKAPKVLIYFTSSLHSGVPSRFSGSGSGTDFTLTISSLQPEDFATYYCQQYSTVPWTFGQGTKVEIKRSKEPLRPRCRPINATLAVEKEGCPVCITVNTTICAGYCPTMTRVLQGVLPALPQVVCNYRDVRFESIRLPGCPRGVNPVVSYAVALSCQCALCRRSTTDCGGPKDHPLTCDDPRFQDSSSSKAPPPSLPSPSRLPGPSDTPILPQQVQLKQSGPGLVQPSQSLSITCTVSGFSLTNYGVHWVRQSPGKGLEWLGVIWSGGNTDYNTPFTSRLSINKDNSKSQVFFKMNSLQSNDTAIYYCARALTYYDYEFAYWGQGTLVTVSAGGGGSGGGGSGGGGSDILLTQSPVILSVSPGERVSFSCRASQSIGTNIHWYQQRTNGSPRLLIKYASESISGIPSRFSGSGSGTDFTLSINSVESEDIADYYCQQNNNWPTTFGAGTKLELK

SEQ ID NO: 6151 - protein, 616 aa, Artificial Sequence
  source: /note="Description of Artificial Sequence: Synthetic single chain variable fragment"
MATGSRTSLLLAFGLLCLPWLQEGSAEVQLVQSGAEVKKPGASVKVSCKASGDTFTTYVIHWMRQAPGQGLEWIGYINPYNDGTKYNEKFKGRVTITSDKSTSTAYMELSSLRSEDTAVYYCARIYYDYDGDYWGQGTLVTVSSGGGGSGGGGSGGGGSDIQMTQSPSSLSASVGDRVTITCITSNDIDDDMNWYQQKPGKAPKLLISEGNTLRPGVPSRFSGSGYGTDFTLTISSLQPEDVATYYCFQSDNLPYTFGQGTKVEIKAAAPDVQDCPECTLQENPFFSQPGAPILQCMGCCFSRAYPTPLRSKKTMLVQKNVTSESTCCVAKSYNRVTVMGGFKVENHTACHCSTCGGGGSGGGGSGGGGSGGGGSQVQLKQSGPGLVQPSQSLSITCTVSGFSLTNYGVHWVRQSPGKGLEWLGVIWSGGNTDYNTPFTSRLSINKDNSKSQVFFKMNSLQSNDTAIYYCARALTYYDYEFAYWGQGTLVTVSAGGGGSGGGGSGGGGSDILLTQSPVILSVSPGERVSFSCRASQSIGTNIHWYQQRTNGSPRLLIKYASESISGIPSRFSGSGSGTDFTLSINSVESEDIADYYCQQNNNWPTTFGAGTKLELK

SEQ ID NO: 6152 - protein, 359 aa, Artificial Sequence
  source: /note="Description of Artificial Sequence: Synthetic single chain variable fragment"
MATGSRTSLLLAFGLLCLPWLQEGSAQVQLQESGPGLVKPSETLSLTCTVSGYSITGGYLWNWIRQPPGKGLEWIGYISYDGTNNYKPSLKDRVTISRDTSKNQFSLKLSSVTAADTAVYYCARYGRVFFDYWGQGTLVTVSSGGGGSGGGGSGGGGSDIVMTQSPLSLPVTPGEPASISCRSSQSIVHSNGNTYLQWYLQKPGQSPQLLIYKVSNRLYGVPDRFSGSGSGTDFTLKISRVEAEDVGVYYCFQGSHVPWTFGQGTKVEIKAAAPDVQDCPECTLQENPFFSQPGAPILQCMGCCFSRAYPTPLRSKKTMLVQKNVTSESTCCVAKSYNRVTVMGGFKVENHTACHCSTC

SEQ ID NO: 6153 - protein, 418 aa, Artificial Sequence
  source: /note="Description of Artificial Sequence: Synthetic single chain variable fragment"
MATGSRTSLLLAFGLLCLPWLQEGSAQVQLQESGPGLVKPSETLSLTCTVSGYSITGGYLWNWIRQPPGKGLEWIGYISYDGTNNYKPSLKDRVTISRDTSKNQFSLKLSSVTAADTAVYYCARYGRVFFDYWGQGTLVTVSSGGGGSGGGGSGGGGSDIVMTQSPLSLPVTPGEPASISCRSSQSIVHSNGNTYLQWYLQKPGQSPQLLIYKVSNRLYGVPDRFSGSGSGTDFTLKISRVEAEDVGVYYCFQGSHVPWTFGQGTKVEIKAAASKEPLRPRCRPINATLAVEKEGCPVCITVNTTICAGYCPTMTRVLQGVLPALPQVVCNYRDVRFESIRLPGCPRGVNPVVSYAVALSCQCALCRRSTTDCGGPKDHPLTCDDPRFQDSSSSKAPPPSLPSPSRLPGPSDTPILPQ

SEQ ID NO: 6154 - protein, 278 aa, Artificial Sequence
  source: /note="Description of Artificial Sequence: Synthetic single chain variable fragment"
MATGSRTSLLLAFGLLCLPWLQEGSASKEPLRPRCRPINATLAVEKEGCPVCITVNTTICAGYCPTMTRVLQGVLPALPQVVCNYRDVRFESIRLPGCPRGVNPVVSYAVALSCQCALCRRSTTDCGGPKDHPLTCDDPRFQDSSSSKAPPPSLPSPSRLPGPSDTPILPQDILLTQSPVILSVSPGERVSFSCRASQSIGTNIHWYQQRTNGSPRLLIKYASESISGIPSRFSGSGSGTDFTLSINSVESEDIADYYCQQNNNWPTTFGAGTKLELK

SEQ ID NO: 6155 - protein, 412 aa, Artificial Sequence
  source: /note="Description of Artificial Sequence: Synthetic single chain variable fragment"
MATGSRTSLLLAFGLLCLPWLQEGSASKEPLRPRCRPINATLAVEKEGCPVCITVNTTICAGYCPTMTRVLQGVLPALPQVVCNYRDVRFESIRLPGCPRGVNPVVSYAVALSCQCALCRRSTTDCGGPKDHPLTCDDPRFQDSSSSKAPPPSLPSPSRLPGPSDTPILPQQVQLKQSGPGLVQPSQSLSITCTVSGFSLTNYGVHWVRQSPGKGLEWLGVIWSGGNTDYNTPFTSRLSINKDNSKSQVFFKMNSLQSNDTAIYYCARALTYYDYEFAYWGQGTLVTVSAGGGGSGGGGSGGGGSDILLTQSPVILSVSPGERVSFSCRASQSIGTNIHWYQQRTNGSPRLLIKYASESISGIPSRFSGSGSGTDFTLSINSVESEDIADYYCQQNNNWPTTFGAGTKLELK

SEQ ID NO: 6156 - protein, 330 aa, Artificial Sequence
  source: /note="Description of Artificial Sequence: Synthetic single chain variable fragment"
QVQLKQSGPGLVQPSQSLSITCTVSGFSLTNYGVHWVRQSPGKGLEWLGVIWSGGNTDYNTPFTSRLSINKDNSKSQVFFKMNSLQSNDTAIYYCARALTYYDYEFAYWGQGTLVTVSAGGGGSGGGGSGGGGSDILLTQSPVILSVSPGERVSFSCRASQSIGTNIHWYQQRTNGSPRLLIKYASESISGIPSRFSGSGSGTDFTLSINSVESEDIADYYCQQNNNWPTTFGAGTKLELKAAAPDVQDCPECTLQENPFFSQPGAPILQCMGCCFSRAYPTPLRSKKTMLVQKNVTSESTCCVAKSYNRVTVMGGFKVENHTACHCSTC

SEQ ID NO: 6157 - protein, 262 aa, Artificial Sequence
  source: /note="Description of Artificial Sequence: Synthetic single chain variable fragment"
MVLLVTSLLLCELPHPAFLLIPDIQMTQSPSSLSASVGDRVTITCRASQGIRNNLAWYQQKPGKAPKRLIYAASNLQSGVPSRFTGSGSGTEFTLIVSSLQPEDFATYYCLQHHSYPLTSGGGTKVEIKRTGSTSGSGKPGSGEGSEVQVLESGGGLVQPGGSLRLSCAASGFTFSSYAMSWVRQAPGKGLEWVSAISGSGGSTNYADSVKGRFTISRDNSKNTLYLQMNSLRAEDTAVYYCAGSSGWSEYWGQGTLVTVSS

SEQ ID NO: 6158 - protein, 243 aa, Artificial Sequence
  source: /note="Description of Artificial Sequence: Synthetic single chain variable fragment"
EIQLQQSGAELVKPGASVKLSCTGSGFNIEDYYIHWVKQRTEQGLEWIGRIDPENDETKYGPIFQGRATITADTSSNTVYLQLSSLTSEDTAVYYCAFRGGVYWGPGTTLTVSSGGGGSGGGGSGGGGSHMDVVMTQSPLTLSVAIGQSASISCKSSQSLLDSDGKTYLNWLLQRPGQSPKRLISLVSKLDSGVPDRFTGSGSGTDFTLRISRVEAEDLGIYYCWQGTHFPGTFGGGTKLEIK

SEQ ID NO: 6159 - protein, 246 aa, Artificial Sequence; identical to SEQ ID NO: 6111
  source: /note="Description of Artificial Sequence: Synthetic single chain variable fragment"

SEQ ID NO: 6160 - protein, 262 aa, Artificial Sequence; identical to SEQ ID NO: 6157
  source: /note="Description of Artificial Sequence: Synthetic single chain variable fragment"

SEQ ID NO: 6161 - protein, 240 aa, Artificial Sequence
  source: /note="Description of Artificial Sequence: Synthetic single chain variable fragment"
MKYLLPTAAAGLLLLAASGAHAQVQLVQSGGGLVKPGGSLRLSCAASGFTFSSYSMNWVRQAPGKGLEWVANIKPDGSERHSVDSVKGRFTISRDNSKNSLYLQMNSLRAEDTAVYYCARPGAGRLDYWGQGTLVTVSSGGGGSGGGGSGGGGSNFMLTQDAAVSVALGQTVRITCQGDSLRSYYASWYQQKPGQAPVLVVYGKNNRPSGIPDRFSGSSSGNTASLTITGAQAEDEADYY

SEQ ID NO: 6162 - protein, 248 aa, Artificial Sequence
  source: /note="Description of Artificial Sequence: Synthetic single chain variable fragment"
QVQLQESGGGLVKPGGSLRLSCAASGFTFSSYWMSWVRQAPGKGLEWVANINRDGSASYYVDSVKGRFTISRDDAKNSLYLQMNSLRAEDTAVYYCARDRGVGYFDLWGRGTLVTVSSASTGGGGSGGGGSGGGGSQSALTQPASVSGSPGQSITISCTGTSSDVGGYNFVSWYQQHPGKAPKLMIYDVSDRPSGVSDRFSGSKSGNTASLIISGLQADDEADYYCSSYGSSSTHVIFGGGTKVTVLG

SEQ ID NO: 6163 - protein, 255 aa, Artificial Sequence
  source: /note="Description of Artificial Sequence: Synthetic single chain variable fragment"
QVQLVQSGAEVKKPGESLKISCKGSGYSFTSYWIAWVRQMPGKGLEYMGLIYPGDSDTKYSPSFQGQVTISVDKSVSTAYLQWSSLKPSDSAVYFCARHDVGYCTDRTCAKWPEWLGVWGQGTLVTVSSGGGGSSGGGSGGGGSQSVLTQPPSVSAAPGQKVTISCSGSSSNIGNNYVSWYQQLPGTAPKLLIYDHTNRPAGVPDRFSGSKSGTSASLAISGFRSEDEADYYCASWDYTLSGWVFGGGTKLTVLG

SEQ ID NO: 6164 - protein, 246 aa, Artificial Sequence
  source: /note="Description of Artificial Sequence: Synthetic single chain variable fragment"
QVQLVESGGGLVQPGGSLRLSCAASGFTFRSYAMSWVRQAPGKGLEWVSAISGRGDNTYYADSVKGRFTISRDNSKNTLYLQMNSLRAEDTAVYYCAKMTSNAFAFDYWGQGTLVTVSSGGGGSGGGGSGGGGSQSVLTQPPSVSGAPGQRVTISCTGSSSNIGAGYGVHWYQQLPGTAPKLLIYGNTNRPSGVPDRFSGFKSGTSASLAITGLQAEDEADYYCQSYDSSLSGWVFGGGTKLTVLG

SEQ ID NO: 6165 - protein, 242 aa, Artificial Sequence
  source: /note="Description of Artificial Sequence: Synthetic single chain variable fragment"
QVQLVESGGGLVQPGGSLRLSCAASGFTFSSYAMGWVRQAPGKGLEWVSSISGSSRYIYYADSVKGRFTISRDNSKNTLYLQMNSLRAEDTAVYYCAKMDASGSYFNFWGQGTLVTVSSGGGGSGGGGSGGGGSETTLTQSPSFLSAFVGDRITITCRASPGIRNYLAWYQQKPGKAPKLLIYAASTLQSGVPSRFSGSGSGTDFTLTISSLQPEDFATYYCQQYNSYPLSFGGGTKVEIKR

SEQ ID NO: 6166 - protein, 241 aa, Artificial Sequence
  source: /note="Description of Artificial Sequence: Synthetic single chain variable fragment"
EVQLLESGGGLVQPGGSLRLSCAASGFTFSSYAMSWVRQAPGKGLEWVSQIDPWGQETLYADSVKGRFTISRDNSKNTLYLQMNSLRAEDTAVYYCAKLTGRFDYWGQGTLVTVSSGGGGSGGGGSGGGGSTDIQMTQSPSSLSASVGDRVTITCRASQSISSYLNWYQQKPGKAPKLLIYSASQLQSGVPSRFSGSGSGTDFTLTISSLQPEDFATYYCQQGPGTPNTFGQGTKVEIKRA

SEQ ID NO: 6167 - protein, 275 aa, Artificial Sequence
  source: /note="Description of Artificial Sequence: Synthetic single chain variable fragment"
QSVLTQPPSVSVSPGQTASISCSGNKLGTKYVYWYQKRPGQSPVLVMYEDNQRPSGIPERFSGSNSGNTATLTIRGTQTVDEADYYCQAWDSDTFVVFGGGTKVTVLGSRGGGGSGGGGSGGGGSLEMAEVQLVETGGGVVQPGRSLRLSCAASGFTFSSYGMHWVRQAPGKGLEWVAVISHDGSNKYYADSVKGRFTISRDNSKDTLYLQMNSLRGEDTAVYYCARSNQWSGYFSFDYWGQGTLVTVSSTSGQAGQHHHHHHGAYPYDVPDYAS

SEQ ID NO: 6168 - protein, 273 aa, Artificial Sequence
  source: /note="Description of Artificial Sequence: Synthetic single chain variable fragment"
SYVLTQPPSVSVAPGKTARITCGGNNIGSKSVHWYQQKPGQAPVVVIHYDSDRPSGIPERFSGSNSGNTATLTISRVEAGDEADYYCQVWDSSSDHPYVFGTGTKVTVLGSRGGGGSGGGGSGGGGSLEMAEVQLVQSGAEVKKPGASVKVSCKASGYTFTTYGISWVRQAPGQGLEWMGWINTYNGHTNYAQKLQGRATMTADTSTNTAYMELRSLRSDDTAVYYCARVIYGSGDYWGQGTLVTVSSTSGQAGQHHHHHHGAYPYDVPDYAS

SEQ ID NO: 6169 - protein, 271 aa, Artificial Sequence
  source: /note="Description of Artificial Sequence: Synthetic single chain variable fragment"
SYVLTQPLSVSVAPGKTARITCGGNNIGSKTVHWYQQKPGQAPVLVIYYDSDRPSGIPERFSGSNSGNTATLTISRVEAGDEADYYCQVWDSSSDHRVFGGGTKLTVLGSRGGGGSGGGGSGGGGSLEMAQVQLQESGPGLVKPSETLSLTCNVSGYSISSGYFWGWIRQPPGKGLEWIGSIYHSRSTYYNPSLKSRVTISVDTSKNQFSLKLNSVTAADTAVYYCARGYGYFDYWGQGTLVTVSSTSGQAGQHHHHHHGAYPYDVPDYAS

SEQ ID NO: 6170 - protein, 276 aa, Artificial Sequence
  source: /note="Description of Artificial Sequence: Synthetic single chain variable fragment"
QSALTQPASVSGSPGQSMSCTGTSSDVGGYNYVSWYQQHPGKAPKLMIYDVSNRPSGVSNRFSGSKSGNTASLTISGLQAEDEADYYCSSYTSSSTSKVFGGGTKLTVLGSRGGGGSGGGGSGGGGSLEMAEVQLVESGGGVVRPGGSLRLSCAASGFTFGDYGMSWVRQAPGKGLEWVSGINWNGGSTGYADSVKGRFTISRDNAKNSLYLQMNSLRAEDTAVYYCARSKYNFHVYYDYWGQGTLVTVSSTSGQAGQHHHHHHGAYPYDVPDYAS

SEQ ID NO: 6171 - protein, 277 aa, Artificial Sequence
  source: /note="Description of Artificial Sequence: Synthetic single chain variable fragment"
QSVLTQPPSASGTPGQTVTISCSGSNSNIGSNYVYWYQQLPGTAPKLLIYRNNQRPSGVPDRFSGSKSGTSASLAISGLRSEDEADYYCAAWDDSLSAYVFGTGTKVTVLGSRGGGGSGGGGSGGGGSLEMAQVQLVQSGAEVKKPGASVKVSCKASGYTFTSYGISWVRQAPGQGLEWMGWISAYNGNTNYAQKLQGRVTMTTDTSTSTAYMELRSLRSDDTAVYYCARSSGNMVSWKDMWGQGTLVTVSSTSGQAGQHHHHHHGAYPYDVPDYAS

SEQ ID NO: 6172 - protein, 272 aa, Artificial Sequence
  source: /note="Description of Artificial Sequence: Synthetic single chain variable fragment"
QSALTQPASVSGSPGQSMSCTGTSSDVGGYNSVSWYQQHPGKAPRLMIYDVSNRPSGVSNRFSGSKSGNTASLTISGLQAEDEADYYCSSYTSSSTPLVFGTGTKVTVLGSRGGGGSGGGGSGGGGSLEMAQVQLVQSGAEVKKPGASVKVSCKASGYTFTSYGISWVRQAPGQGLEWMGWISAYNGNTNYAQKLQGRVTMTTDTSTSTAYMELRSLRSDDTAVYYCARGAVAYHDWGQGTLVTVSSTSGQAGQHHHHHHGAYPYDVPDYAS

SEQ ID NO: 6173 - protein, 274 aa, Artificial Sequence
  source: /note="Description of Artificial Sequence: Synthetic single chain variable fragment"
QSVVTQPPSVSAAPGQRVTISCSGSSSNISIYDVSWYQQLPGTAPKLLIYGNNKRPSGIADRFSGSTSGTSATLGITGLQTGDEADYYCGTWDDSLSGGVFGGGTKLTVLGRGGGGSGGGGSGGGGSLEMAQMQLVQSGAEVKKPGSSVKVSCEASGGTLSSYAINWVRQAPGQGLEWMGGIIPMFGTAHYAQKFQGRVTITADESTKTAYMELSSLRSEDTAVYYCARGVHYASFDHWGQGTLVTVSSTSGQAGQHHHHHHGAYPYDVPDYAS

SEQ ID NO: 6174 - protein, 274 aa, Artificial Sequence
  source: /note="Description of Artificial Sequence: Synthetic single chain variable fragment"
QSVLTQPPSVSAAAGQKVTISCSGSDSNIGNNYVSWYQHLPGTAPKLLIYDVKNRPSGIPDRFSGSKSGSSATLGIAGLQPGDEADYYCGTWDSRLDAYVFGTGTKVTVLGSRGGGGSGGGGSGGGGSLEMAQMQLVQSGAEVKKPGASVKVSCKTSGFPFNIFGITWVRQAPGQGLEWMGWISGYNGNTDYPQKFQGRVTMSTDTSTSTAYMELRNLKSDDTAVYYCARGAYGGMDTWGQGTLVTVSSTSGQAGQHHHHHHGAYPYDVPDYAS

SEQ ID NO: 6175 - protein, 274 aa, Artificial Sequence
  source: /note="Description of Artificial Sequence: Synthetic single chain variable fragment"
QSVLTQPPSASGTPGQRVTISCSGSSSNIGSNTVNWYQQLPGTAPKLLIYSNNQRPSGVPDRFSGSKSGTSASLAISGLQSEDEADYYCAAWDDSLNGYVFGTGTKVTVLGSRGGGGSGGGGSGGGGSLEMAQVQLQQWGAGLLKPSETLSLTCAVYGGSFSGYYWSWIRQPPGKGLEWIGEINHSGSTNYNPSLKSRVTISVDTSKNQFSLKLSSVTAADTAVYYCAREGPYDGFDSWGQGTLVTVSSTSGQAGQHHHHHHGAYPYDVPDYAS

SEQ ID NO: 6176 - protein, 276 aa, Artificial Sequence
  source: /note="Description of Artificial Sequence: Synthetic single chain variable fragment"
QSVVTQPPSVSGAPGQRVTISCTGSTSNIGAGYDVHWYQQLPGTAPKLLIYTNNFRPSGVPDRFSASKSGTSASLAITGLQAEDEADYYCGTWDSSLSAVVFGGGTKLTVLGSRGGGGSGGGGSGGGGSLEMAEVQLVESGTEVKKPGASVKVSCKASGYMFTSYGLNWVRQAPGQGLEWMGWISANNGKTNYAKKFQDRVTMTRDTSTSTGYMELRSLRSDDTAVYYCARHIGGSYFDRWGQGTLVTVSSTSGQAGQHHHHHHGAYPYDVPDYAS

SEQ ID NO: 6177 - protein, 274 aa, Artificial Sequence
  source: /note="Description of Artificial Sequence: Synthetic single chain variable fragment"
NFMLTQPHSVSESPGKTVTISCTRSSGSIASNYVQWYQQRPGSAPTTVIYEDNQRPSGVPDRFSGSIDSSSNSASLTISGLKTEDEADYYCQSYDSSNSVVFGGGTKLTVLGSRGGGGSGGGGSGGGGSLEMAQVQLVQSGTEVKKPGASVRVACKASGYPFNKYDINWVRQAPGQGLEWMGGIIPIFRTTNYAQKFQGRVTITADESTSTAYMELSSLRSEDTAVYYCAREWFYWDIWGQGTLVTVSSTSGQAGQHHHHHHGAYPYDVPDYAS

SEQ ID NO: 6178 - protein, 249 aa, Artificial Sequence
  source: /note="Description of Artificial Sequence: Synthetic single chain variable fragment"
QSVLTQPPSASGTPGQRVTISCSGSSSNIGSNTVNWYQQLPGTAPKLLIYSNNQRPSGVPDRFSGSKSGTSASLAISGLQSEDEADYYCAAWDDSLNGYVFGTGTKVTVLGSRGGGGSGGGGSGGGGSLEMAQVQLQQWGAGLLKPSETLSLTCAVYGGSFSGYYWSWIRQPPGKGLEWIGEINHSGSTNYNPSLKSRVTISVDTSKNQFSLKLSSVTAADTAVYYCAREGPYDGFDSWGQGTLVTVSS

SEQ ID NO: 6179 - protein, 249 aa, Artificial Sequence
  source: /note="Description of Artificial Sequence: Synthetic single chain variable fragment"
NFMLTQPHSVSESPGKTVTISCTRSSGSIASNYVQWYQQRPGSAPTTVIYEDNQRPSGVPDRFSGSIDSSSNSASLTISGLKTEDEADYYCQSYDSSNSVVFGGGTKLTVLGSRGGGGSGGGGSGGGGSLEMAQVQLVQSGTEVKKPGASVRVACKASGYPFNKYDINWVRQAPGQGLEWMGGIIPIFRTTNYAQKFQGRVTITADESTSTAYMELSSLRSEDTAVYYCAREWFYWDIWGQGTLVTVSS

SEQ ID NO: 6180 - protein, 250 aa, Artificial Sequence
  source: /note="Description of Artificial Sequence: Synthetic single chain variable fragment"
QSVLTQPPSVSVSPGQTASISCSGNKLGTKYVYWYQKRPGQSPVLVMYEDNQRPSGIPERFSGSNSGNTATLTIRGTQTVDEADYYCQAWDSDTFVVFGGGTKVTVLGSRGGGGSGGGGSGGGGSLEMAEVQLVETGGGVVQPGRSLRLSCAASGFTFSSYGMHWVRQAPGKGLEWVAVISHDGSNKYYADSVKGRFTISRDNSKDTLYLQMNSLRGEDTAVYYCARSNQWSGYFSFDYWGQGTLVTVSS

SEQ ID NO: 6181 - protein, 248 aa, Artificial Sequence
  source: /note="Description of Artificial Sequence: Synthetic single chain variable fragment"
SYVLTQPPSVSVAPGKTARITCGGNNIGSKSVHWYQQKPGQAPVVVIHYDSDRPSGIPERFSGSNSGNTATLTISRVEAGDEADYYCQVWDSSSDHPYVFGTGTKVTVLGSRGGGGSGGGGSGGGGSLEMAEVQLVQSGAEVKKPGASVKVSCKASGYTFTTYGISWVRQAPGQGLEWMGWINTYNGHTNYAQKLQGRATMTADTSTNTAYMELRSLRSDDTAVYYCARVIYGSGDYWGQGTLVTVSS

SEQ ID NO: 6182 - protein, 246 aa, Artificial Sequence
  source: /note="Description of Artificial Sequence: Synthetic single chain variable fragment"
SYVLTQPLSVSVAPGKTARITCGGNNIGSKTVHWYQQKPGQAPVLVIYYDSDRPSGIPERFSGSNSGNTATLTISRVEAGDEADYYCQVWDSSSDHRVFGGGTKLTVLGSRGGGGSGGGGSGGGGSLEMAQVQLQESGPGLVKPSETLSLTCNVSGYSISSGYFWGWIRQPPGKGLEWIGSIYHSRSTYYNPSLKSRVTISVDTSKNQFSLKLNSVTAADTAVYYCARGYGYFDYWGQGTLVTVSS

SEQ ID NO: 6183 - protein, 253 aa, Artificial Sequence
  source: /note="Description of Artificial Sequence: Synthetic single chain variable fragment"
QSALTQPASVSGSPGQSRRISCTGTSSDVGGYNYVSWYQQHPGKAPKLMIYDVSNRPSGVSNRFSGSKSGNTASLTISGLQAEDEADYYCSSYTSSSTSKVFGGGTKLTVLGSRGGGGSGGGGSGGGGSLEMAEVQLVESGGGVVRPGGSLRLSCAASGFTFGDYGMSWVRQAPGKGLEWVSGINWNGGSTGYADSVKGRFTISRDNAKNSLYLQMNSLRAEDTAVYYCARSKYNFHVYYDYWGQGTLVTVSS

SEQ ID NO: 6184 - protein, 252 aa, Artificial Sequence
  source: /note="Description of Artificial Sequence: Synthetic single chain variable fragment"
QSVLTQPPSASGTPGQTVTISCSGSNSNIGSNYVYWYQQLPGTAPKLLIYRNNQRPSGVPDRFSGSKSGTSASLAISGLRSEDEADYYCAAWDDSLSAYVFGTGTKVTVLGSRGGGGSGGGGSGGGGSLEMAQVQLVQSGAEVKKPGASVKVSCKASGYTFTSYGISWVRQAPGQGLEWMGWISAYNGNTNYAQKLQGRVTMTTDTSTSTAYMELRSLRSDDTAVYYCARSSGNMVSWKDMWGQGTLVTVSS

SEQ ID NO: 6185 - protein, 249 aa, Artificial Sequence
  source: /note="Description of Artificial Sequence: Synthetic single chain variable fragment"
QSALTQPASVSGSPGQSRRISCTGTSSDVGGYNSVSWYQQHPGKAPRLMIYDVSNRPSGVSNRFSGSKSGNTASLTISGLQAEDEADYYCSSYTSSSTPLVFGTGTKVTVLGSRGGGGSGGGGSGGGGSLEMAQVQLVQSGAEVKKPGASVKVSCKASGYTFTSYGISWVRQAPGQGLEWMGWISAYNGNTNYAQKLQGRVTMTTDTSTSTAYMELRSLRSDDTAVYYCARGAVAYHDWGQGTLVTVSS

SEQ ID NO: 6186 - protein, 250 aa, Artificial Sequence
  source: /note="Description of Artificial Sequence: Synthetic single chain variable fragment"
QSVVTQPPSVSAAPGQRVTISCSGSSSNISIYDVSWYQQLPGTAPKLLIYGNNKRPSGIADRFSGSTSGTSATLGITGLQTGDEADYYCGTWDDSLSGGVFGGGTKLTVLGSRGGGGSGGGGSGGGGSLEMAQMQLVQSGAEVKKPGSSVKVSCEASGGTLSSYAINWVRQAPGQGLEWMGGIIPMFGTAHYAQKFQGRVTITADESTKTAYMELSSLRSEDTAVYYCARGVHYASFDHWGQGTLVTVSS

SEQ ID NO: 6187 - protein, 249 aa, Artificial Sequence
  source: /note="Description of Artificial Sequence: Synthetic single chain variable fragment"
QSVLTQPPSVSAAAGQKVTISCSGSDSNIGNNYVSWYQHLPGTAPKLLIYDVKNRPSGIPDRFSGSKSGSSATLGIAGLQPGDEADYYCGTWDSRLDAYVFGTGTKVTVLGSRGGGGSGGGGSGGGGSLEMAQMQLVQSGAEVKKPGASVKVSCKTSGFPFNIFGITWVRQAPGQGLEWMGWISGYNGNTDYPQKFQGRVTMSTDTSTSTAYMELRNLKSDDTAVYYCARGAYGGMDTWGQGTLVTVSS

SEQ ID NO: 6188 - protein, 251 aa, Artificial Sequence
  source: /note="Description of Artificial Sequence: Synthetic single chain variable fragment"
QSVVTQPPSVSGAPGQRVTISCTGSTSNIGAGYDVHWYQQLPGTAPKLLIYTNNFRPSGVPDRFSASKSGTSASLAITGLQAEDEADYYCGTWDSSLSAVVFGGGTKLTVLGSRGGGGSGGGGSGGGGSLEMAEVQLVESGTEVKKPGASVKVSCKASGYMFTSYGLNWVRQAPGQGLEWMGWISANNGKTNYAKKFQDRVTMTRDTSTSTGYMELRSLRSDDTAVYYCARHIGGSYFDRWGQGTLVTVSS

SEQ ID NO: 6189 - protein, 249 aa, Artificial Sequence
  source: /note="Description of Artificial Sequence: Synthetic single chain variable fragment"
SYVLTQPPSVSVAPGKTARITCGGNNIGSKSVHWYQQKPGQAPVLVIYYDSDRPSGIPERFSGSNSGNTATLTISRVEAGDEADYYCQVWDSSSDHYVFGTGTKVTVLGSRGGGGSGGGGSGGGGSLEMAEVQLVETGGGLVQPGGSLRLSCAASGFTFSSYAMSWVRQAPGKGLEWVSAISGSDGSTYYADSVKGRFTISRDNSKNTLYLQMNSLRDEDTAVYYCARSHEANLVGDWWGQGTLVTVSS

SEQ ID NO: 6190 - protein, 247 aa, Artificial Sequence
  source: /note="Description of Artificial Sequence: Synthetic single chain variable fragment"
QSVVTQPPSVSVAPGKTARITCGGNNIGSKSVHWYQQKPGQAPVLVIYYDSDRPSGIPERFSGSNSGNTATLTISRVEAGDEADYYCQVWDSSSDVVFGGGTKLTVLGSRGGGGSGGGGSGGGGSLEMAEVQLVQSGAEVKKPGASVKVSCKASGYTFTSYGISWVRQAPGQGLEWMGWISAYNGNTNYAQKLQGRVTMTTDTSTSTAYMELRSLRSDDTAVYYCARWGGFGAVDHWGQGTLVTVSS

SEQ ID NO: 6191 - protein, 245 aa, Artificial Sequence
  source: /note="Description of Artificial Sequence: Synthetic single chain variable fragment"
SSELTQDPAVSVALGQTVKITCQGDSLTDYHATWYQQKPGQAPVAVIYATNNRPTGIPDRFSGSSSGNTASLTITGAQAEDEADYYCNSRDSGTDEVLFGGGTKLTVLGSRGGGGSGGGGSGGGGSLEMAEVQLVETGGGLVKPGGSLRLSCAASGFTFSSYSMNWVRQAPGKGLEWVSSISSSSSYIYYADSVKGRFTISRDNAKNSLYLQMNSLRAEDTAVYYCARGQGYDYWGQGTLVTVSS

SEQ ID NO: 6192 - protein, 244 aa, Artificial Sequence
  source: /note="Description of Artificial Sequence: Synthetic single chain variable fragment"
SYVLTQPPSVSVAPGKTARITCGGNNIGSKSVHWYQQKPGQAPVLVVYDDSDRPSGIPERFSGSNSGNTATLSISRVEAGDEADYYCQVWDSSSDHTVFGTGTKVTVLGSRGGGGSGGGGSGGGGSLEMAQVQLQQWGAGLLKPSETLSLTCAVYGGSFSGYYWSWIRQPPGKGLEWIGEINHSGSTNYNPSLKSRVTISVDTSKNQFSLLSSVTAADTAVYYCARYYPGMDMWGQGTLVTVSS

SEQ ID NO: 6193 - protein, 247 aa, Artificial Sequence
  source: /note="Description of Artificial Sequence: Synthetic single chain variable fragment"
QAVLTQPPSTSGTPGQRVTISCSGSSSNIGRNGVNWYQQLPGAAPKVLIYNDNQRPSGVPDRVSGSQSGSSGTLAIDGLRSEDEADYYCAAWDDSLHGVVFGGGTKLTVLGSRGGGGSGGGGSGGGGSLEMAQVQLVQSGAEVKKPGASVKVSCKVSGYTLNELSMHWVRQAPGKGLEWMGGFDPEDGETIYAQKFQGRVTMTEDTSTDTAYMELSSLRSEDTAVYYCARGGYGDSWGQGTLVTVSS

SEQ ID NO: 6194 - protein, 265 aa, Artificial Sequence
  source: /note="Description of Artificial Sequence: Synthetic single chain variable fragment"
NFMLTQPHSVSESPGKTVTISCTRSSGSIASNYVQWYQQRPGSAPTTVIYEDNQRPSGVPDRFSGSIDSSSNSASLTISGLKTEDEADYYCQSYDSSNSWVFGGGTKLTVLGSRGGGGSGGGGSGGGGSLEMAQVQLVQSGAEVKRPGSSVKVSCTASGGTFSSDAISWVRQAPGQGLEWMGGIIPMFGTANYAQKFQGRVTITADESTSTAYMELSSLRSEDTAVYYCAREGYYYPSAYLGSVLNDISSVYDEWGQGTLVTVSS

SEQ ID NO: 6195 - protein, 249 aa, Artificial Sequence
  source: /note="Description of Artificial Sequence: Synthetic single chain variable fragment"
QSVVTQPPSVSAAPGQKVTISCSGSTSNIGNNDVSWYQQLPGTAPKLLIYDNNKRPSGIPDRFSGSKSGTSATLGITGLQTGDEADYYCGTWDSSVSASWVFGRGTKLTVLGSRGGGGSGGGGSGGGGSLEMAQVQLVQSGAEVKKPGASVKVSCKASGYTFTSYGISWVRQAPGQGLEWMGWISAYNGNTNYPQKLQGRVTMTTDPSTSTAYMELRSLRSDDTAVYYCARSMTSFDYWGQGTLVTVSS

SEQ ID NO: 6196 - protein, 249 aa, Artificial Sequence
  source: /note="Description of Artificial Sequence: Synthetic single chain variable fragment"
QSVLTQPPSVSAAPGQKVTISCSGSNSNIGNNYVSWYQQLPGTAPKLLIYDNNKRPSGIPDRFSGSRSGTSATLGITGLQTGDEADYYCGTWNTTVTPGYVFGTGTKVTVLGSRGGGGSGGGGSGGGGSLEMAEVQLVQSGAEVKKPGASVKVSCKASGYTFTSYGISWVRQAPGQGLEWMGWISAYNGNTNYAQKLQGRVTMTTDTSTSTAYMELRSLRSDDTAMYYCARSVYDLDTWGQGTLVTVSS

SEQ ID NO: 6197 - protein, 252 aa, Artificial Sequence
  source: /note="Description of Artificial Sequence: Synthetic single chain variable fragment"
QSVVTQPPSVSAAPGQKVTISCSGSSSNIGNNYVSWYQQLPGTAPKLLIYDNNKRPSGIPDRFSGSKSGTSATLGITGLQTGDEADYYCGTWDSSLGAPYVFGTGTKVTVLGSRGGGGSGGGGSGGGGSLEMAEVQLVQSWGGSEQPGRSLRLSCAASGFTFDDYAMHWVRQAPGKGLEWVSGISWNSGSIGYADSVKGRFTISRDNAKNSLYLQMNSLRAEDTAMYYCARYRQVGSAYDSWGQGTLVTVSS

SEQ ID NO: 6198 - protein, 249 aa, Artificial Sequence
  source: /note="Description of Artificial Sequence: Synthetic single chain variable fragment"
LPVLTQPPSVSVAPGKTARITCGGNNIGSKSVHWYQQKPGQAPVLVVYADSDRPSGIPERFSGSNSGNTATLTISRVEAGDEADYYCQVWDSSSYHNYVFGTGTKVTVLGSRGGGGSGGGGSGGGGSLEMAEVQLVQSGAEVKKPGASVKVSCKASGYTFTSYGISWVRQAPGQGLEWMGWISAYNGNTNYAQKLQGRVTMTTDTSTSTAYMELSSLRSEDTAMYYCARYWGFGVSDRWGQGTLVTVSS

SEQ ID NO: 6199 - protein, 250 aa, Artificial Sequence
  source: /note="Description of Artificial Sequence: Synthetic single chain variable fragment"
NFMLTQPHSVSESPGKTVTISCTGSSGSIASNYVQWYQQRPGSAPTTVIYEDNQRPSGVPDRFSGSIDSSSNSASLTISGLKTEDEADYYCQSYDSSNLWVFGGGTKLTVLGSRGGGGSGGGGSGGGGSLEMAQMQLVQSGAEVKKPGSSVKVSCKASGGTFSSYAISWVRQAPGQGLEWMGGIIPIFGTANYAQKFQGRVTITADESTSTAYMELSSLRSEDTAVYYCARYNYYYYDSWGQGTLVTVSS

SEQ ID NO: 6200 - protein, 247 aa, Artificial Sequence
  source: /note="Description of Artificial Sequence: Synthetic single chain variable fragment"
DIQMTQSPSSLSASVGDRVTITCRASQSISSYLNWYQQKPGKAPKLLIYAASSLQSGVPSRFSGSGSGTDFTLTISSLQPEDFATYYCQQSYSTPFTFGPGTKVDIKRSRGGGGSGGGGSGGGGSLEMAEVQLVQSGAEVKKPGSSVKVSCKASGGTFSSYAISWVRQAPGQGLEWMGGIIPIFGTANYAQKFQGRVTITADESTSTAYMELSSLRSEDTAMYYCARYWGYDSYDEWGQGTLVTVSS

SEQ ID NO: 6201 - protein, 249 aa, Artificial Sequence
  source: /note="Description of Artificial Sequence: Synthetic single chain variable fragment"
NFMLTQPHSVSESPGKTVTISCTGSSGSIASNYVQWYQQRPGSAPTTVIYEDNQRPSGVPDRFSGSIDSSSNSASLTISGLKTEDEADYYCQSYDSSNWVFGGGTKLTVLGSRGGGGSGGGGSGGGGSLEMAEVQLVQSGAEVKKPGSSVKVSCKASGGTFSSYAISWVRQAPGQGLEWMGGIIPIFGTANYAQKFQGRVTITADESTSTAYMELSSLRSEDTAVYYCARNNHYYNDYWGQGTLVTVSS

SEQ ID NO: 6202 - protein, 259 aa, Artificial Sequence
  source: /note="Description of Artificial Sequence: Synthetic single chain variable fragment"
QSVLTQPPSVSGAPGQGVTIPCTGSSSNIGAGYDVHWYQQLPGTAPKLLIYGNNNRPSGVPDRFSGSRSGSSASLAITGLQAEDEADYYCQSYDSSLSDVVFGGGTKVTVLGSRGGGGSGGGGSGGGGSLEMAEVQLVQSGAEVKKPGATVKISCKVSGYTFTDYYMHWVQQAPGKGLEWMGLVDPEDGETIYAEKFQGRVTITADTSTDTAYMELSSLRSEDTAVYYCARYWSYSFDYLYMPEGNDWWGQGTLVTVSS

SEQ ID NO: 6203 - protein, 251 aa, Artificial Sequence
  source: /note="Description of Artificial Sequence: Synthetic single chain variable fragment"
QSVLTQPPAASGTPGQRVTISCSGGVSNIGSGALNWYQQLPGTAPKLLIYSYNQRPSGVSDRFSGSRSATSASLAISGLQSEDEADYYCATWDDSVNGWVFGGGTKLTVLGSRGGGGSGGGGSGGGGSLEMAQVQLVQSGAEVKKPGDSVKVSCKPSGYNFLNYGINWVRQAPGQGLEWMGWISTYTGNTNYAQKLQGRVTFTTDTSTSTAYMEMRSLRSDDTAVYYCARDLYYYEGVDYWGQGTLVTVSS

SEQ ID NO: 6204 - protein, 249 aa, Artificial Sequence
  source: /note="Description of Artificial Sequence: Synthetic single chain variable fragment"
QAVLTQPPSVSVAPGKTARVTCGGNNIGSESVHWYQQKPGQAPVLVIYYDTDRPSGIPERFSGSHSGTTATLTISRVEAGDEADYYCQVWDSSRDHVVFGGGTKLTVLGSRGGGGSGGGGSGGGGSLEMAQVQLVQSGGGVVQPGRSLRLSCAASGFTFSSYAMHWVRQAPGKGLEWVAVISYDGSNKYYADSVKGLFTISRDNSKNTLYLQMNSLRAEDTAVYYCARSYFTSGFYDYWGQGTLVTVSS

SEQ ID NO: 6205 - protein, 250 aa, Artificial Sequence
  source: /note="Description of Artificial Sequence: Synthetic single chain variable fragment"
QSVVTQPPSVSGAPGQRVTISCTGSSSNIGAGYDVNWYQQFPGTAPKLLIYGNSNRPSGVPDRFSGSKSGTSASLAITGLQAEDEADYYCQSYDSSLSGSYVFGTGTKVTVLGSRGGGGSGGGGSGGGGSLEMAQMQLVQSGAEVKKPGASVKVSCKASGYTLTELSMHWVRQAPGKGLEWMGGFDPEDGETIYAQKFQGRVTMTEDTSTDTAYMELSSLRSEDTAVYYCARMSSMYYDWGQGTLVTVSS

SEQ ID NO: 6206 - protein, 251 aa, Artificial Sequence
  source: /note="Description of Artificial Sequence: Synthetic single chain variable fragment"
LPVLTQPPSASGTPGQRVTISCSGSSSNVGSYTVNWYRQLPGTAPTLLIYNNNQRPSGVPDRFSDSKSGTSASLTISGLQPEDEADYYCAAWDDRLGGYVFGTGTKVTVLGSRGGGGSGGGGSGGGGSLEMAEVQLVQSGAEVKKPGESLKISCKGSGYSFTNYWIGWVRQMPGKGLEWMGIIYPGDSDTRYSPSFQGQVTISADKSISTAYLQWSSLKASDTAMYYCARSTGSSHMSDEWGQGTLVTVSS

SEQ ID NO: 6207 - protein, 248 aa, Artificial Sequence
  source: /note="Description of Artificial Sequence: Synthetic single chain variable fragment"
NFMLTQPHSVSESPGKTVTISCTGSSGSIASNYVQWYQQRPGSAPTTVIYEDNQRPSGVPDRFSGSIDSSSNSASLTISGLKTEDEADYYCQSYDSSNHWVFGGGTKLTVLGSRGGGGSGGGGSGGGGSLEMAQVQLQQWGAGLLKPSETLSLTCAVYGGSFSGYYWSWIRQPPGKGLEWIGEITHSGRSNYNPSLKSRVTISVDTSKNQFSLKLSSVTAADTAVYYCARSSIMSDYWGQGTLVTVSS

SEQ ID NO: 6208 - protein, 251 aa, Artificial Sequence
  source: /note="Description of Artificial Sequence: Synthetic single chain variable fragment"
QSVLTQPPSVSGAPGQRVTISCTGSTSNIGAGYDVHWYQQLPGTAPKLLINNNRNRPSGVPDRFSGSKSGTSATLGITGLQTGDEADYYCGTWDGSLTGAVFGGGTKLTVLGSRGGGGSGGGGSGGGGSLEMAEVQLVQSGAEVKKPGSSVKVSCKASGGTFSSYAISWVRQAPGQGLEWMGGIIPIFGTANYAQKFQGRVTITADESTSTAYMELSSLRSEDTAVYYCARGSALDHYDRWGQGTLVTVSS

SEQ ID NO: 6209 - protein, 249 aa, Artificial Sequence
  source: /note="Description of Artificial Sequence: Synthetic single chain variable fragment"
NFMLTQPHSVSESPGKTVTISCTRSSGSIASNYVQWYQQRPGSAPTTVIYEDNQRPSGVPDRFSGSIDSSSNSASLTISGLKTEDEADYYCQSYDSTNWVFGGGTKLTVLGSRGGGGSGGGGSGGGGSLEMAQVQLVQSGAEVKKPGSSVKVSCKASGGTFSSYAISWVRQAPGQGLEWMGGIIPIFGTANYAQKFQGRVTITADESTSTAYMELSSLRSEDTAVYYCARYNYYFNDYWGQGTLVTVSS

SEQ ID NO: 6210 - protein, 248 aa, Artificial Sequence
  source: /note="Description of Artificial Sequence: Synthetic single chain variable fragment"
SYVLTQPPSVSVAPGKTARITCGGNNIGSKSVHWYQQKPGQAPVLVIYYDSDRPSGIPERFSGSNSGNTATLTISRVEAGDEADYYCQVWDSSSDHPYVFGTGTKVTVLGSRGGGGSGGGGSGGGGSLEMAQMQLVQSGAEVKKPGASVKVSCKASGYTFTSYGISWVRQAPGQGLEWMGWISAYNGNTNYAQKLQGRVTMTTDTSTSTAYMELRSLRSDDTAVYYCARSMFGAHDSWGQGTLVTVSS

SEQ ID NO: 6211 - protein, 251 aa, Artificial Sequence
  source: /note="Description of Artificial Sequence: Synthetic single chain variable fragment"
QSVLTQPPSVSGAPGQRVTISCTGSSSNIGAGFDVHWYQLLPGTAPKLLIYANSNRPSGVPDRFSGSKSGTSASLAITGLLAEDEADYYCQSYDSSLSGVVFGGGTKLTVLGSRGGGGSGGGGSGGGGSLEMAQVQLVQSGAEVKKPGSSVKVSCKASGGTFSSYAISWVRQAPGQGLEWMGGIIPIFGTANYAQKFQGRVTITADESTSTAYMELSSLRSEDTAVYYCARGASFDRHDNWGQGTLVTVSS

SEQ ID NO: 6212 - protein, 249 aa, Artificial Sequence
  source: /note="Description of Artificial Sequence: Synthetic single chain variable fragment"
NFMLTQPHSVSESPGKTVTISCTRSSGSIASNYVQWYQQRPGSSPTTVIYEDNQRPSGVPDRFSGSIDSSSNSASLTISGLKTEDEADYYCQSYDSSNWVFGGGTKLTVLGSRGGGGSGGGGSGGGGSLEMAEVQLVQSGAEVKKPGSSVKVSCKASGGTFSSYAISWVRQAPGQGLEWMGGIIPIFGTANYAQKFQGRVTITADESTSTAYMELSSLRSEDTAVYYCARSNYYYNDYWGQGTLVTVSS

SEQ ID NO: 6213 - protein, 249 aa, Artificial Sequence
  source: /note="Description of Artificial Sequence: Synthetic single chain variable fragment"
QSVLTQPPSVSGAPGQRVTISCTGSSSNIGAGYDVHWYQQLPGTAPKLLIYGNSNRPSGVPDRFSGSKSGTSASLAITGLQAEDEADYYCQSYDSSLSGYVFGTGTKVTVLGSRGGGGSGGGGSGGGGSLEMAQVQLVQSGAEVKKPGASVKVSCKVSGYTLTELSMHWVRQAPGKGLEWMGGFDPEDGETIYAQKFQGRVTMTEDTSTDTAYMELSSLRSEDTAVYYCARYSGVYYDWGQGTLVTVSS

SEQ ID NO: 6214 - protein, 249 aa, Artificial Sequence
  source: /note="Description of Artificial Sequence: Synthetic single chain variable fragment"
NFMLTQPHSVSGSPGKTVTISCTGSSGSIADNFVQWYQQRPGGVPTTVIFNDDERPSGVPDRFSGSIDTSSNSASLTISGLKTEDEADYYCQSYDNNNRGVFGGGTKLTVLGSRGGGGSGGGGSGGGGSLEMAQVQLVQSGAEVKKPGSSVKVSCKASGGTFSSYAISWVRQAPGQGLEWMGWMNPNSGNTGYAQKFQGRVTMTRNTSISTAYMELSNLRSEDTAVYYCARYYSYGYDWGQGTLVTVSS

SEQ ID NO: 6215 - protein, 255 aa, Artificial Sequence
  source: /note="Description of Artificial Sequence: Synthetic single chain variable fragment"
QSVVTQPPSVSGAPGQTVTISCTGGSSNIGTGYFVNWYQQVPGKAPKLLILGNNNRPSGVPDRLSGSTSGTSASLAITGLQAEDEGTYYCQSYDSSLSGYVFGTGTKVTVLGSRGGGGSGGGGSGGGGSLEMAQVQLQQSGPGLVKPSQTLSLTCGISGDSVSTNSVAWHWIRQSPSRGLEWLGRTYYRSKWSNDYGVSVKSRITIIPDTSKNQFSLQLNSVTPEDTAVYYCARSSSWYQIFDYWGQGTLVTVSS

SEQ ID NO: 6216 - protein, 254 aa, Artificial Sequence
  source: /note="Description of Artificial Sequence: Synthetic single chain variable fragment"
NFMLTQPHSVSESPGKTVTISCTGSSDSIANNYVQWYQQRPGSAPTNVIYEDVQRPSGVPDRFSGSIDSSSNSASLTISGLKTEDEAVYYCQSYHSDNRWVFGGGTKLTVLGSRGGGGSGGGGSGGGGSLEMAQVQLVESGGGLVQPGGSLRLSCAASGFTFSSYAMSWVRQAPGKGLEWVSAISGSGGSTYYADSVKGRFTISRDNSKNTLYLQMNSLRAEDTAVYYCARSGAYWDYSVYDEWGQGTLVTVSS

SEQ ID NO: 6217 - protein, 248 aa, Artificial Sequence
  source: /note="Description of Artificial Sequence: Synthetic single chain variable fragment"
QSVLTQPPSVSVSPGQTATIACSGHKLGDKYASWYQQKSGQSPVLIIYQDNKRPSGIPERFSGSNSGNTATLTISGTQALDEADYYCQAWDSSTYVAFGGGTKLTVLGSRGGGGSGGGGSGGGGSLEMAQVQLQESGPGLVKPSETLSLTCVVSGGSISSSNWWSWVRQPPGKGLEWIGEIYHSGSPNYNPSLKSRVTISVDKSKNQFSLKLSSVTAADTAVYYCARMTTHTFGYDAWGQGTLVTVSS

SEQ ID NO: 6218 - protein, 245 aa, Artificial Sequence
  source: /note="Description of Artificial Sequence: Synthetic single chain variable fragment"
QPVLTQPPSVSVAPGKTATITCGGNNIGSESVHWYHQKPGQAPVLVIYDDAGRPSGIPERFTGSNSGNTATLTISRVEAGDEADYYCQVWDRNSAQFVFGPGTKVTVLGSRGGGGSGGGGSGGGGSLEMAEVQLVQSGAEVKKPGASVKVSCKASGYTFTSYGISWVRQAPGQGLEWMGWISAYNGNTNYAQKLQGRVTMTTDTSTSTAYMELRSLRSDDTAVYYCARGVHLDWWGQGTLVTVSS

SEQ ID NO: 6219 - protein, 257 aa, Artificial Sequence
  source: /note="Description of Artificial Sequence: Synthetic single chain variable fragment"
QSVVTQPPSASGTPGQRVTISCSGSSSNIGSNYVYWYQQLPGTAPKLLIYSNNQRPSGVPDRFSGSKSGTSASLAISGLRSEDEADYYCAAWDDSLSGYVFGTGTKLTVLGSRGGGGSGGGGSGGGGSLEMAQVQLQQWGAGLLKPSETLSLTCAVYGGSFSGYYWSWIRQPPGKGLEWIGEINHSGSTNYNPSLKSRVTISVDTSKNQFSLKLSSVTAADTAVYYCARLYEGGYHGWGSWLSSDSWGQGTLVTVSS

SEQ ID NO: 6220 - protein, 250 aa, Artificial Sequence
  source: /note="Description of Artificial Sequence: Synthetic single chain variable fragment"
QSVLTQPPSASGTPGQRVTISCSGSSSNIGSNTVNWYQQLPGTAPKLLIYSNNQRPSGVPDRFSGSKSGTSASLAISGLQSEDEADYYCAAWDDSLNGYWVFGGGTKLTVLGSRGGGGSGGGGSGGGGSLEMAQVQLQQWGAGLLKPSETLSLTCAVYGGSFSGYYWSWIRQPPGKGLEWIGEINHSGSTNYNPSLKSRVTISVDTSKNQFSLKLSSVTAADTAVYYCAREGAFDAFDIWGQGTMVTVSS

SEQ ID NO: 6221 - protein, 252 aa, Artificial Sequence
  source: /note="Description of Artificial Sequence: Synthetic single chain variable fragment"
SYELTQPPSASGTPGQRVTISCSGSSSNIGSNYVYWYQQLPGTAPKLFIYRNNQRPSGVPDRFSGSKSGTSASLAISGLRSEDEADYYCAAWDDSLSGYLFGTGTKVTVLGSRGGGGSGGGGSGGGGSLEMAEVQLVESGGGLVQPGRSLRLSCAASGFTFDDYAMHWVRQAPGKGLEWVSGISWNSGSIGYADSVKGRFTISRDNAKNSLYLQMNSLRAEDTALYYCANGDSNYYYGMDVWGQGTTVTVSS

SEQ ID NO: 6222 - protein, 256 aa, Artificial Sequence
  source: /note="Description of Artificial Sequence: Synthetic single chain variable fragment"
QSALTQPASVSGSPGQSITISCTGTSSDIGGYNYVSWYQQHPGKAPKLMIYDVSNRPSGVSNRFSGSKSGNTASLTISGLQAEDEADYYCISYTRTWNPYVFGSGTKVTVLGSRGGGGSGGGGSGGGGSLEMAEVQLVQSGGGVVQPGGSLRLSCAASGFTFDDYAMHWVRQAPGKGLEWVSLISGDGGSTYYADSVKGRFTISRDNSKNSLYLQMNSLRTEDTALYYCAKDRAAAGYYYYGMDVWGQGTTVTVSS

SEQ ID NO: 6223 - protein, 250 aa, Artificial Sequence
  source: /note="Description of Artificial Sequence: Synthetic single chain variable fragment"
LPVLTQPPSVSVSPGQTAIITCSGDKLGEKYVSWYQQKPGQSPVLVIDQDTRRPSGIPERFSGSNSGTTATLTISGTQAMDEADYYCQAWDRGVVFGGGTKLTVLGSRGGGGSGGGGSGGGGSLEMAEVQLVESGGDLVQPGRSLRLSCAASGFTFNDYAMHWVRQAPGKGLEWVSGISWSGNNIGYADSVKGRFTISRDNAKNSLYLQMNSLRAEDTALYYCAKDSIRYGITWGGFDYWGQGTLVTVSS

SEQ ID NO: 6224 - protein, 250 aa, Artificial Sequence
  source: /note="Description of Artificial Sequence: Synthetic single chain variable fragment"
QPVLTQPPSVSKGLRQTATLTCTGNSNNVGNLGVAWLQQHQGHPPKLLSYRNNNRPSGISERLSASRSGNTASLTITGLQPEDEADYYCSAWDSSLSAWVFGGGTKLTVLGSRGGGGSGGGGSGGGGSLEMAEVQLVESGGVVVQPGGSLRLSCAASGFTFDDYAMHWVRQAPGKGLEWVSLINWDGGSTYYADSVKGRFTISRDNSKNSLYLQMNSLRAEDTALYYCAKGMGLRAFDYWGQGTLVTVSS

SEQ ID NO: 6225 - protein, 254 aa, Artificial Sequence
  source: /note="Description of Artificial Sequence: Synthetic single chain variable fragment"
QSVLTQPPSASGTPGQRVTISCSGSSSNIGSNTVNWYQQLPGTAPKLLIYSNDQRPSGVPDRFSGSKSGTSASLAISGLQSEDEADYYCASWDDSLNGRYVFGTGTKVTVLGSRGGGGSGGGGSGGGGSLEMAQVQLVQSGAEVRKPGASVKVSCKTSGYTFSWYAIHWVRQAPGQRLEWMGWINAGNGNTKYSQKFQGRVSLTRDTSASTAYMELSSLRSDDTAVYYCARPDNYGSGGDVFDRGQGTMVTVSS

SEQ ID NO: 6226 - protein, 248 aa, Artificial Sequence
  source: /note="Description of Artificial Sequence: Synthetic single chain variable fragment"
NFMLTQPHSVSESPGKTVTISCTRSSGSIASNFVQWYQQRPGSAPTPMIYEDNNRPPGVPDRFSASVDSSSNSASLTISGLKTEDEADYYCQSYDTSNVVFGGGTKLTVLGSRGGGGSGGGGSGGGGSLEMAEVQLVESGGGLVQPGGSLRLSCAASGFTFSSYEMNWVRQAPGKGLEWVSYISSSGSTIYYADSVKGRFTISRDNAKNSLYLQMNSLRAEDTAVYYCARWDYGMDVWGQGTTVTVSS

SEQ ID NO: 6227 - protein, 253 aa, Artificial Sequence
  source: /note="Description of Artificial Sequence: Synthetic single chain variable fragment"
QAVLTQPPSASGAPGQRVTVSCSGSNSNIGSNYVNWYQQFPGTAPKLLMYSSSQRPSGVPDRFSGSKSGTSASLAISGLHSEDEADYYCATWDDSLNAWVFGGGTKLTVLGSRGGGGSGGGGSGGGGSLEMAEVQLVQSGAEVRKPGASVKVSCKTSGYTFTWYAIHWVRQAPGQRLEWMGWINAGSGNTKYSQKFQGRVTLTRDTSASTAYMELSSLRSDDTAVYYCARPNNYGSGGDVFDRGQGTMVTVSS

SEQ ID NO: 6228 - protein, 253 aa, Artificial Sequence
  source: /note="Description of Artificial Sequence: Synthetic single chain variable fragment"
QSVVTQPPSVSAAPGQKVTISCSGSSSNIGNNYVSWYQQLPGTAPKLLIYDNNKRPSGIPDRFSGSKSGTSATLGITGLQTGDEADYYCGTWDSSLSAYVFGTGTKVTVLGSRGGGGSGGGGSGGGGSLEMAQVQLVQSGAEVKKPGASVKVSCKASGYTFTNYALHWVRQAPGQGLEWMAWINGGNGNTKYSQNFQGRVTITRDTSASTAYMELSSLRSEDTAVYYCAKPEETAGTIHFDYWGQGTPVTVSS

SEQ ID NO: 6229 - protein, 257 aa, Artificial Sequence
  source: /note="Description of Artificial Sequence: Synthetic single chain variable fragment"
QAVLTQPHSVSESPGKTVTISCTRSSGSIASNYVQWYQQRPGSAPTTVIYEDNQRPSGVPDRFSGSIDSSSNSASLTISGLKTEDEADYYCQSYDSTITVFGGGTKLTVLGSRGGGGSGGGGSGGGGSLEMAQVQLVQSGAEVKKPGSSVKVSCKASGGTFSSYAISWVRQAPGQGLEWMGGIIPIFGTANYAQKFQGRVTITADESTSTAYMELSSLRSEDTAVYYCAGEGYYDSSGYSNGDAFDRGQGTMVTVSS

SEQ ID NO: 6230 - protein, 251 aa, Artificial Sequence
  source: /note="Description of Artificial Sequence: Synthetic single chain variable fragment"
SYVLTQPPSVSVSPGQTASITCSGDRLTNKYVSWYQQKPGQSPVLVIYEDAKRPSGIPARFSGSNSGNTATLTISGTQAMDESEYYCQAWDSSVVVFGGGTKLTVLGSRGGGGSGGGGSGGGGSLEMAEVQLVESGGGLVQPGRSLRLSCAASGFTFDDYAMHWVRQAPGKGLEWVSGISWNSGSIGYADSVKGRFTISRDNAKNSLYLQMNSLRDEDTALYYCAKDRGGGVIVKDAFDIWGQGTMVTVSS

SEQ ID NO: 6231 - protein, 250 aa, Artificial Sequence
  source: /note="Description of Artificial Sequence: Synthetic single chain variable fragment"
SYELTQPPAASGTPGQRVTISCSGGVSNIGSGALNWYQQLPGTAPKLLIYSYNQRPSGVSDRFSGSRSATSASLAISGLQSEDEADYYCATWDDSVNGWVFGGGTKLTVLGSRGGGGSGGGGSGGGGSLEMAEVQLVESGAEVKKPGDSVKVSCKPSGYNFLNYGINWVRQAPGQGLEWMGWISTYTGNTNYAQKLQGRVTFTTDTSTSTAYMEMRSLRSDDTAVYYCARQQGGGWYDVWGQGTLVTVSS

SEQ ID NO: 6232 - protein, 256 aa, Artificial Sequence
  source: /note="Description of Artificial Sequence: Synthetic single chain variable fragment"
QSVVTQPPSVSAAPGEKVTISCSGSNFNVGNNDVSWYQQLPGAAPKLLIYDNNKRPSGIPDRFSGSKSGTSATLDITGLHSDDEADYYCGTWDSSLNTGGVFGTGTKVTVLGSRGGGGSGGGGSGGGGSLEMAEVQLVQSGAEVKKPGASVKVSCKASGYTFTSYTISWVRQAPGQGLEWMGWISTYNGLTNYAQNLQGRVTMTTDTFTTTAYMELRSLRSDDTAVYYCVREGSPDYGDFASFDYWGQGTLVTVSS

SEQ ID NO: 6233 - protein, 256 aa, Artificial Sequence
  source: /note="Description of Artificial Sequence: Synthetic single chain variable fragment"
QSVLTQPPSVSAPPGQKVTISCSGSSSNIGNNYVSWYQQFPGTAPKLLIYDNNKRPSGISDRFSGSKSGTSATLGIAGLQTGDEADYYCGTWDTSLSGFYVFGSGTKVTVLGSRGGGGSGGGGSGGGGSLEMAEVQLVQSGAEVKKPGASVKVSCKASGYTFTSYTISWVRQAPGQGLEWMGWISTYNGLTNYAQNLQGRVTMTTDTFTTTAYMELRSLRSDDTAVYYCVREGSPDYGDFASFDYWGQGTLVTVSS

SEQ ID NO: 6234 - protein, 254 aa, Artificial Sequence
  source: /note="Description of Artificial Sequence: Synthetic single chain variable fragment"
LPVLTQPPSASATPGQRVTISCSGTTSNIGSNTVHWYQQLPGTAPKLLIYNNNQRPSGVPDRFSGSKSGTSASLAISGLRSEDEATYSCATWDDSLSGVVFGGGTKLTVLGSRGGGGSGGGGSGGGGSLEMAEVQLVQSGAEVKKPGSSVKVSCKASGGTFSSYAISWVRQAPGQGLEWMGGIIPIFGTANYAQKFQGRVTITADESTSTAYMELSSLRSEDTAVYYCARDPAYGDYEYDAFDRGQGTMVTVSS

SEQ ID NO: 6235 - protein, 250 aa, Artificial Sequence
  source: /note="Description of Artificial Sequence: Synthetic single chain variable fragment"
QSVLTQPPSASGTPGQRVTISCSGSSSNIGTNGVNWFQQFPGTAPKLLIYTNDQRPSGVPDRFSGSKSGTSASLAISGLQSADEADYYCAVWDHSLNGPVFGGGTKLTVLGSRGGGGSGGGGSGGGGSLEMAQVQLVQSGAEVKKPGSSVKVSCKASGGTFSSYAISWVRQAPGQGLEWMGGIIPIFGTANYAQKFQGRVTITADESTSTAYMELSSLRSEDTAVYYCARGAGFDAFDIWGQGTMVTVSS

SEQ ID NO: 6236 - protein, 248 aa, Artificial Sequence
  source: /note="Description of Artificial Sequence: Synthetic single chain variable fragment"
QAVLTQPPSASGTPGQRVTISCSGSSSNIGSNTVNWYQQLPGTAPKLLIYSNNQRPSGVPDRFSGSKSGTSASLAISGLQSEDETDYYCAAWDDSLNGYVFGTGTKVTVLGSRGGGGSGGGGSGGGGSLEMAQVQLQQWGAGLLKPSETLSLTCAVYGGSFSGYYWSWIRQPPGKGLEWIGEINHSGSTNYNPSLKSRVTISVDTSKNQFSLKLSSVTAADTAVYYCAREGLDAFDIWGQGTMVTVSS

SEQ ID NO: 6237 - protein, 247 aa, Artificial Sequence
  source: /note="Description of Artificial Sequence: Synthetic single chain variable fragment"
QAVLTQPPSASGTPGQRVTISCSGSSSNIGSNTVNWYQQLPGTAPKLLMYSNDQRPSGVPDRFSGSKSGTSASLAISGLQSEDEADYYCAAWDDSLNGYVFAAGTQLTVLSSRGGGGSGGGGSGGGGSLEMAQVQLQQWGAGLLKPSETLSLTCAVYGGSFSGYYWSWIRQPPGKGLEWIGEINHSGSTNYNPSLKSRVTISVDTSKNQFSLKLSSVTAADTAVYYCAREGLDAFDRGQGTMVTVSS

SEQ ID NO: 6238 - protein, 256 aa, Artificial Sequence
  source: /note="Description of Artificial Sequence: Synthetic single chain variable fragment"
QSVVTQPPSVSAAPGQKVTISCSGSSSNIGNNYVSWYQQLPGTAPKLLIYDNNKRPSGIPDRFSGSKSGTSATLGITGLQTGDEADYYCGTWDSSLSAAYVFGTGTKVTVLGSRGGGGSGGGGSGGGGSLEMAQVQLVQSGAEVKKPGASVKVSCKASGYSFTSYTISWVRQAPGQGLEWMGWVSTYNGLRNYAQNLQGRVTMTTDTLTTTAYMELRSLRSDDTAVYYCVREGSPDYGDFAAFDYWGQGTLVTVSS

SEQ ID NO: 6239 - protein, 247 aa, Artificial Sequence
  source: /note="Description of Artificial Sequence: Synthetic single chain variable fragment"
QAVLTQPPSASETPGQRVTISCSGSRSNIGTNIVHWYQQRPGMAPKLLTYGSRRPSGVPDRFSGSKFGTSASLAISGLQSEDEADYYCAAWDDSLNGPAFGGGTKLTVLGSRGGGGSGGGGSGGGGSLEMAQVQLQQWGAGLLKPSETLSLTCAVYGGSFSGYYWSWIRQPPGKGLEWIGEINHSGSTNYNPSLKSRVTISVDTSKNQFSLKLSSVTAADTAVYYCARDGGGYFDYWGQGTLVTVSS

SEQ ID NO: 6240 - protein, 253 aa, Artificial Sequence
  source: /note="Description of Artificial Sequence: Synthetic single chain variable fragment"
QSVLTQPPSVSGAPGQRVTISCTGSSSNIGARYDVHWYQQLPGTAPRLLISANYDRPSGVPDRFSGSKSGTSASLAITGLQAEDEADYYCQSYDSSVSAWVFGGGTKVTVLGSRGGGGSGGGGSGGGGSLEMAEVQLVQSGAEVKEPGASVRISCQASGYNFISYYMHWVRQAPGQGLEWMGTINPGSGETDYSQKLQGRVTMTRDPSTGTFDMGLSSLTSGDTAVYYCATGLIRGASDAFNRGRGTMVTVSS

SEQ ID NO: 6241 - protein, 250 aa, Artificial Sequence
  source: /note="Description of Artificial Sequence: Synthetic single chain variable fragment"
QPVLTQPPSVSVSPGQTAAIPCSGDKLGDKFASWYQQKPGQSPVLVIYQDTKRPSGIPERFSGSNSGNTATLTISGTQAMDEADYYCQTWASGRVVFGGGTKLTVLGSRGGGGSGGGGSGGGGSLEMAQVQLQQSGPGLVKPSQTLSLTCAISGDSVSSNSAAWNWIRQSPSRGLEWLGRTYYRSKWYNDYAVSVKSRITINPDTSKNQFSLQLNSVTPEDTAVYYCARERSGWKGFDYWGQGTLVTVSS

SEQ ID NO: 6242 - protein, 253 aa, Artificial Sequence
  source: /note="Description of Artificial Sequence: Synthetic single chain variable fragment"
DVVMTQSPPSLSVTPGEPASITCRSSQSLLERNAYNYLDWYLQRPGQSPQLLIYLGSNRAAGVPDRFSGSGSGRDFTLKISRVEPEDVGVYYCMQALQAPFTFGGGTKVEIKRSRGGGGSGGGGSGGGGSLEMAEVQLVQSGGGLVQPGGSLRLSCAASGFTFSSYAMSWVRQAPGKGLEWVSAISGSGGSTYYADSVKGRFTISRDNSKNTLYLQMNSLRAEDTAVYYCAKWGPFQDAFDIWGQGTMVTVSS

SEQ ID NO: 6243 - protein, 256 aa, Artificial Sequence
  source: /note="Description of Artificial Sequence: Synthetic single chain variable fragment"
QAVLTQPASVSGSPGQSITISCTGTSSDVGGYNYVSWYQQHPGKAPKLMIYEVSNRPSGVSNRFSGSKSGNTASLTISGLQAEDEADYYCSSYTSSSTPYVFGAGTKVTVLGSRGGGGSGGGGSGGGGSLEMAEVQLVESGGGLVQPGRSLRLSCAASGFTFDDYAMHWVRQAPGKGLEWVSGISWNSGSIGYADSVKGRFTISRDNAKNSLYLQMNSLRAEDTALYYCAKARWTAVASDHHFDYWGQGTLVTVSS

SEQ ID NO: 6244 - protein, 248 aa, Artificial Sequence
  source: /note="Description of Artificial Sequence: Synthetic single chain variable fragment"
QAVLTQPPSASGTPGQRVTISCSGSSSNIGSNTVNWYQQLPGTAPKLLIYSNNQRPSGVPDRFSGSKSGTSASLAISGLQSEDEADYYCAAWDDSLNGYVFGTGTKLTVLGSRGGGGSGGGGSGGGGSLEMAEVQLVQSGAEVKKPGSSVKVSCKASGGTFSSYAISWVRQAPGQGLEWMGGIIPIFGTANYAQKFQGRVTITADESTSTAYMELSSLRSEDTAVYYCARDWDYMDVWGKGTTVTVSS

SEQ ID NO: 6245 - protein, 260 aa, Artificial Sequence
  source: /note="Description of Artificial Sequence: Synthetic single chain variable fragment"
QSVLTQPPSVSGAPGQRVTVSCTGSRSNIGAGYDVHWYQQLPGTAPKLLIYGNSNRPPGVPDRFSGSKSGTSASLVITGLQAEDAADYYCQSYDNTVRESPYVFGTGTKVTVLGSRGGGGSGGGGSGGGGSLEMAEVQLVQSGAEVKKPGASVKVSCKVSGYTLTELSMHWVRQAPGKGLEWMGGFDPEDGETIYAQKFQGRVTMTEDTSTDTAYMELSSLRSEDTAVYYCATESNLVSRHYYYYGMDVWGQGTTVTVSS

SEQ ID NO: 6246 - protein, 260 aa, Artificial Sequence; identical to SEQ ID NO: 6245
  source: /note="Description of Artificial Sequence: Synthetic single chain variable fragment"

SEQ ID NO: 6247 - protein, 264 aa, Artificial Sequence
  source: /note="Description of Artificial Sequence: Synthetic single chain variable fragment"
LPVLTQPPSASGTPGQRVTISCSGTSSNIGSNSVDWYQQLPGTAPKLLIYSNNQRPSGVPDRISGSKSGTSASLAISGLQSEDEADYYCAAWDDSLNGYVFGTGTKVTVLGSRGGGGSGGGGSGGGGSLEMAEVQLVQSGAEVKKPGASVKVSCKASGYTFTGYYMHWVRQAPGQGLEWMGWINPNSGGTNYAQKFQGRVTMTRDTSISTAYMELSRLRSDDTAVYYCARDYGYYGSGSYSSGPLYYYYGMDVWGQGTTVTVSS

SEQ ID NO: 6248 - protein, 259 aa, Artificial Sequence
  source: /note="Description of Artificial Sequence: Synthetic single chain variable fragment"
QAVLTQPPSASGTPGQRVTISCSGSSSNIGSNTVNWYQQLPGTAPKLLMYNNDQRPSGVPDRFSGSKSGTSASLAISGLQSEDEADYYCAAWDDSLNGYVFGPGTKVTVLGSRGGGGSGGGGSGGGGSLEMAQVQLVESGAEVKKPGASVKVSCKASGYTFTSYGISWVRQAPGQGLEWMGWISAYNGNTNYAQKLQGRVTMTTDTSTSTAYMELRSLRSDDTAVYYCARDLSRGANPHYYYYYGMDVWGQGTTVTVSS

SEQ ID NO: 6249 - protein, 251 aa, Artificial Sequence
  source: /note="Description of Artificial Sequence: Synthetic single chain variable fragment"
NFMLTQPHAVSESPGKTVTISCTRSSGSIASNYVQWYQQRPGSSPRTVIYEDNQRPSGVPGRFSGSIDSSSNSASLTISGLKTEDEADYYCQSYDSTSVLFGGGTKLTVLGSRGGGGSGGGGSGGGGSLEMAEVQLVQSGAEVKKPGSSVKVSCKASGGTFSSNSLSWVRQAPGQGLEWMGRIFPILGITNYAQKFQGRVTITADKSTSTAYMELSSLRSEDTAVYYCARGNYQWYDAFDVGQGTMVTVSS

SEQ ID NO: 6250 - protein, 248 aa, Artificial Sequence
  source: /note="Description of Artificial Sequence: Synthetic single chain variable fragment"
QPVLTQPPSVSVVPGKTARITCGGKNIGSKSVHWYQQKPGQAPVVVIHYDSDRPSGIPERFSGSNSGNTATLTISRVEAGDEADYYCQVWDSSSDHPYVFGTGTKVTVLGSRGGGGSGGGGSGGGGSLEMAQVQLVQSGAEVKKPGASVKVSCKASGYTFTNYGISWVRQAPGQGLEWMGWISAYNGNTNYAHKLQGRVTMTTDTSTSTANMELRSLRPDDTAVYYCARSYFGSHDYWGQGTLVTVSS

SEQ ID NO: 6251 - protein, 253 aa, Artificial Sequence
  source: /note="Description of Artificial Sequence: Synthetic single chain variable fragment"
SYVLTQPPSVSVAPGKTARISCGGNDIGSKSVFWYQQRPGQAPVLVVYDDSDRPSGLPERFSGFNSGNTATLTISRVEAGDEADYYCQVWDSSSDHYVFGTGTKVTVLGSRGGGGSGGGGSGGGGSLEMAQVQLVESGGGLVQPGRSLRLSCAASGFTFDDYAMHWVRQAPGKGLEWVSGISWNSGSIGYADSVKGRFTISRDNAKNSLYLQMNSLRAEDTALYYCAKDITYGSGSYGAFDIWGQGTMVTVSS

SEQ ID NO: 6252 - protein, 274 aa, Artificial Sequence; identical to SEQ ID NO: 6175
  source: /note="Description of Artificial Sequence: Synthetic single chain variable fragment"

SEQ ID NO: 6253 - protein, 274 aa, Artificial Sequence; identical to SEQ ID NO: 6177
  source: /note="Description of Artificial Sequence: Synthetic single chain variable fragment"

SEQ ID NO: 6254 - protein, 275 aa, Artificial Sequence; identical to SEQ ID NO: 6167
  source: /note="Description of Artificial Sequence: Synthetic single chain variable fragment"

SEQ ID NO: 6255 - protein, 273 aa, Artificial Sequence; identical to SEQ ID NO: 6168
  source: /note="Description of Artificial Sequence: Synthetic single chain variable fragment"

SEQ ID NO: 6256 - protein, 271 aa, Artificial Sequence; identical to SEQ ID NO: 6169
  source: /note="Description of Artificial Sequence: Synthetic single chain variable fragment"

SEQ ID NO: 6257 - protein, 278 aa, Artificial Sequence
  source: /note="Description of Artificial Sequence: Synthetic single chain variable fragment"
QSALTQPASVSGSPGQSRRISCTGTSSDVGGYNYVSWYQQHPGKAPKLMIYDVSNRPSGVSNRFSGSKSGNTASLTISGLQAEDEADYYCSSYTSSSTSKVFGGGTKLTVLGSRGGGGSGGGGSGGGGSLEMAEVQLVESGGGVVRPGGSLRLSCAASGFTFGDYGMSWVRQAPGKGLEWVSGINWNGGSTGYADSVKGRFTISRDNAKNSLYLQMNSLRAEDTAVYYCARSKYNFHVYYDYWGQGTLVTVSSTSGQAGQHHHHHHGAYPYDVPDYAS

SEQ ID NO: 6258 - protein, 277 aa, Artificial Sequence; identical to SEQ ID NO: 6171
  source: /note="Description of Artificial Sequence: Synthetic single chain variable fragment"

SEQ ID NO: 6259 - protein, 274 aa, Artificial Sequence
  source: /note="Description of Artificial Sequence: Synthetic single chain variable fragment"
QSALTQPASVSGSPGQSITISCTGTSSDVGGYNSVSWYQQHPGKAPRLMIYDVSNRPSGVSNRFSGSKSGNTASLTISGLQAEDEADYYCSSYTSSSTPLVFGTGTKVTVLGSRGGGGSGGGGSGGGGSLEMAQVQLVQSGAEVKKPGASVKVSCKASGYTFTSYGISWVRQAPGQGLEWMGWISAYNGNTNYAQKLQGRVTMTTDTSTSTAYMELRSLRSDDTAVYYCARGAVAYHDWGQGTLVTVSSTSGQAGQHHHHHHGAYPYDVPDYAS

SEQ ID NO: 6260 - protein, 275 aa, Artificial Sequence
  source: /note="Description of Artificial Sequence: Synthetic single chain variable fragment"
QSVVTQPPSVSAAPGQRVTISCSGSSSNISIYDVSWYQQLPGTAPKLLIYGNNKRPSGIADRFSGSTSGTSATLGITGLQTGDEADYYCGTWDDSLSGGVFGGGTKLTVLGSRGGGGSGGGGSGGGGSLEMAQMQLVQSGAEVKKPGSSVKVSCEASGGTLSSYAINWVRQAPGQGLEWMGGIIPMFGTAHYAQKFQGRVTITADESTKTAYMELSSLRSEDTAVYYCARGVHYASFDHWGQGTLVTVSSTSGQAGQHHHHHHGAYPYDVPDYAS

SEQ ID NO: 6261 - protein, 274 aa, Artificial Sequence; identical to SEQ ID NO: 6174
  source: /note="Description of Artificial Sequence: Synthetic single chain variable fragment"

SEQ ID NO: 6262 - protein, 276 aa, Artificial Sequence; identical to SEQ ID NO: 6176
  source: /note="Description of Artificial Sequence: Synthetic single chain variable fragment"

SEQ ID NO: 6263 - protein, 274 aa, Artificial Sequence
  source: /note="Description of Artificial Sequence: Synthetic single chain variable fragment"
SYVLTQPPSVSVAPGKTARITCGGNNIGSKSVHWYQQKPGQAPVLVIYYDSDRPSGIPERFSGSNSGNTATLTISRVEAGDEADYYCQVWDSSSDHYVFGTGTKVTVLGSRGGGGSGGGGSGGGGSLEMAEVQLVETGGGLVQPGGSLRLSCAASGFTFSSYAMSWVRQAPGKGLEWVSAISGSDGSTYYADSVKGRFTISRDNSKNTLYLQMNSLRDEDTAVYYCARSHEANLVGDWWGQGTLVTVSSTSGQAGQHHHHHHGAYPYDVPDYAS

SEQ ID NO: 6264 - protein, 272 aa, Artificial Sequence
  source: /note="Description of Artificial Sequence: Synthetic single chain variable fragment"
QSVVTQPPSVSVAPGKTARITCGGNNIGSKSVHWYQQKPGQAPVLVIYYDSDRPSGIPERFSGSNSGNTATLTISRVEAGDEADYYCQVWDSSSDVVFGGGTKLTVLGSRGGGGSGGGGSGGGGSLEMAEVQLVQSGAEVKKPGASVKVSCKASGYTFTSYGISWVRQAPGQGLEWMGWISAYNGNTNYAQKLQGRVTMTTDTSTSTAYMELRSLRSDDTAVYYCARWGGFGAVDHWGQGTLVTVSSTSGQAGQHHHHHHGAYPYDVPDYAS

SEQ ID NO: 6265 - protein, 270 aa, Artificial Sequence
  source: /note="Description of Artificial Sequence: Synthetic single chain variable fragment"
SSELTQDPAVSVALGQTVKITCQGDSLTDYHATWYQQKPGQAPVAVIYATNNRPTGIPDRFSGSSSGNTASLTITGAQAEDEADYYCNSRDSGTDEVLFGGGTKLTVLGSRGGGGSGGGGSGGGGSLEMAEVQLVETGGGLVKPGGSLRLSCAASGFTFSSYSMNWVRQAPGKGLEWVSSISSSSSYIYYADSVKGRFTISRDNAKNSLYLQMNSLRAEDTAVYYCARGQGYDYWGQGTLVTVSSTSGQAGQHHHHHHGAYPYDVPDYAS

SEQ ID NO: 6266 - protein, 270 aa, Artificial Sequence
  source: /note="Description of Artificial Sequence: Synthetic single chain variable fragment"
SYVLTQPPSVSVAPGKTARITCGGNNIGSKSVHWYQQKPGQAPVLVVYDDSDRPSGIPERFSGSNSGNTATLSISRVEAGDEADYYCQVWDSSSDHTVFGTGTKVTVLGSRGGGGSGGGGSGGGGSLEMAQVQLQQWGAGLLKPSETLSLTCAVYGGSFSGYYWSWIRQPPGKGLEWIGEINHSGSTNYNPSLKSRVTISVDTSKNQFSLKLSSVTAADTAVYYCARYYPGMDMWGQGTLVTVSSTSGQAGQHHHHHHGAYPYDVPDYAS

SEQ ID NO: 6267 - protein, 272 aa, Artificial Sequence
  source: /note="Description of Artificial Sequence: Synthetic single chain variable fragment"
QAVLTQPPSTSGTPGQRVTISCSGSSSNIGRNGVNWYQQLPGAAPKVLIYNDNQRPSGVPDRVSGSQSGSSGTLAIDGLRSEDEADYYCAAWDDSLHGVVFGGGTKLTVLGSRGGGGSGGGGSGGGGSLEMAQVQLVQSGAEVKKPGASVKVSCKVSGYTLNELSMHWVRQAPGKGLEWMGGFDPEDGETIYAQKFQGRVTMTEDTSTDTAYMELSSLRSEDTAVYYCARGGYGDSWGQGTLVTVSSTSGQAGQHHHHHHGAYPYDVPDYAS

SEQ ID NO: 6268 - protein, 290 aa, Artificial Sequence
  source: /note="Description of Artificial Sequence: Synthetic single chain variable fragment"
NFMLTQPHSVSESPGKTVTISCTRSSGSIASNYVQWYQQRPGSAPTTVIYEDNQRPSGVPDRFSGSIDSSSNSASLTISGLKTEDEADYYCQSYDSSNSWVFGGGTKLTVLGSRGGGGSGGGGSGGGGSLEMAQVQLVQSGAEVKRPGSSVKVSCTASGGTFSSDAISWVRQAPGQGLEWMGGIIPMFGTANYAQKFQGRVTITADESTSTAYMELSSLRSEDTAVYYCAREGYYYPSAYLGSVLNDISSVYDEWGQGTLVTVSSTSGQAGQHHHHHHGAYPYDVPDYAS

SEQ ID NO: 6269 - protein, 274 aa, Artificial Sequence
  source: /note="Description of Artificial Sequence: Synthetic single chain variable fragment"
QSVVTQPPSVSAAPGQKVTISCSGSTSNIGNNDVSWYQQLPGTAPKLLIYDNNKRPSGIPDRFSGSKSGTSATLGITGLQTGDEADYYCGTWDSSVSASWVFGRGTKLTVLGSRGGGGSGGGGSGGGGSLEMAQVQLVQSGAEVKKPGASVKVSCKASGYTFTSYGISWVRQAPGQGLEWMGWISAYNGNTNYPQKLQGRVTMTTDPSTSTAYMELRSLRSDDTAVYYCARSMTSFDYWGQGTLVTVSSTSGQAGQHHHHHHGAYPYDVPDYAS

SEQ ID NO: 6270 - protein, 274 aa, Artificial Sequence
  source: /note="Description of Artificial Sequence: Synthetic single chain variable fragment"
QSVLTQPPSVSAAPGQKVTISCSGSNSNIGNNYVSWYQQLPGTAPKLLIYDNNKRPSGIPDRFSGSRSGTSATLGITGLQTGDEADYYCGTWNTTVTPGYVFGTGTKVTVLGSRGGGGSGGGGSGGGGSLEMAEVQLVQSGAEVKKPGASVKVSCKASGYTFTSYGISWVRQAPGQGLEWMGWISAYNGNTNYAQKLQGRVTMTTDTSTSTAYMELRSLRSDDTAMYYCARSVYDLDTWGQGTLVTVSSTSGQAGQHHHHHHGAYPYDVPDYAS

SEQ ID NO: 6271 - protein, 277 aa, Artificial Sequence
  source: /note="Description of Artificial Sequence: Synthetic single chain variable fragment"
QSVVTQPPSVSAAPGQKVTISCSGSSSNIGNNYVSWYQQLPGTAPKLLIYDNNKRPSGIPDRFSGSKSGTSATLGITGLQTGDEADYYCGTWDSSLGAPYVFGTGTKVTVLGSRGGGGSGGGGSGGGGSLEMAEVQLVQSWGGSEQPGRSLRLSCAASGFTFDDYAMHWVRQAPGKGLEWVSGISWNSGSIGYADSVKGRFTISRDNAKNSLYLQMNSLRAEDTAMYYCARYRQVGSAYDSWGQGTLVTVSSTSGQAGQHHHHHHGAYPYDVPDYAS

SEQ ID NO: 6272 - protein, 274 aa, Artificial Sequence
  source: /note="Description of Artificial Sequence: Synthetic single chain variable fragment"
LPVLTQPPSVSVAPGKTARITCGGNNIGSKSVHWYQQKPGQAPVLVVYADSDRPSGIPERFSGSNSGNTATLTISRVEAGDEADYYCQVWDSSSYHNYVFGTGTKVTVLGSRGGGGSGGGGSGGGGSLEMAEVQLVQSGAEVKKPGASVKVSCKASGYTFTSYGISWVRQAPGQGLEWMGWISAYNGNTNYAQKLQGRVTMTTDTSTSTAYMELSSLRSEDTAMYYCARYWGFGVSDRWGQGTLVTVSSTSGQAGQHHHHHHGAYPYDVPDYAS

SEQ ID NO: 6273 - protein, 275 aa, Artificial Sequence
  source: /note="Description of Artificial Sequence: Synthetic single chain variable fragment"
NFMLTQPHSVSESPGKTVTISCTGSSGSIASNYVQWYQQRPGSAPTTVIYEDNQRPSGVPDRFSGSIDSSSNSASLTISGLKTEDEADYYCQSYDSSNLWVFGGGTKLTVLGSRGGGGSGGGGSGGGGSLEMAQMQLVQSGAEVKKPGSSVKVSCKASGGTFSSYAISWVRQAPGQGLEWMGGIIPIFGTANYAQKFQGRVTITADESTSTAYMELSSLRSEDTAVYYCARYNYYYYDSWGQGTLVTVSSTSGQAGQHHHHHHGAYPYDVPDYAS

SEQ ID NO: 6274 - protein, 272 aa, Artificial Sequence
  source: /note="Description of Artificial Sequence: Synthetic single chain variable fragment"
DIQMTQSPSSLSASVGDRVTITCRASQSISSYLNWYQQKPGKAPKLLIYAASSLQSGVPSRFSGSGSGTDFTLTISSLQPEDFATYYCQQSYSTPFTFGPGTKVDIKRSRGGGGSGGGGSGGGGSLEMAEVQLVQSGAEVKKPGSSVKVSCKASGGTFSSYAISWVRQAPGQGLEWMGGIIPIFGTANYAQKFQGRVTITADESTSTAYMELSSLRSEDTAMYYCARYWGYDSYDEWGQGTLVTVSSTSGQAGQHHHHHHGAYPYDVPDYAS

SEQ ID NO: 6275 - protein, 274 aa, Artificial Sequence
  source: /note="Description of Artificial Sequence: Synthetic single chain variable fragment"
NFMLTQPHSVSESPGKTVTISCTGSSGSIASNYVQWYQQRPGSAPTTVIYEDNQRPSGVPDRFSGSIDSSSNSASLTISGLKTEDEADYYCQSYDSSNWVFGGGTKLTVLGSRGGGGSGGGGSGGGGSLEMAEVQLVQSGAEVKKPGSSVKVSCKASGGTFSSYAISWVRQAPGQGLEWMGGIIPIFGTANYAQKFQGRVTITADESTSTAYMELSSLRSEDTAVYYCARNNHYYNDYWGQGTLVTVSSTSGQAGQHHHHHHGAYPYDVPDYAS

SEQ ID NO: 6276 - protein, 284 aa, Artificial Sequence
  source: /note="Description of Artificial Sequence: Synthetic single chain variable fragment"
QSVLTQPPSVSGAPGQGVTIPCTGSSSNIGAGYDVHWYQQLPGTAPKLLIYGNNNRPSGVPDRFSGSRSGSSASLAITGLQAEDEADYYCQSYDSSLSDVVFGGGTKVTVLGSRGGGGSGGGGSGGGGSLEMAEVQLVQSGAEVKKPGATVKISCKVSGYTFTDYYMHWVQQAPGKGLEWMGLVDPEDGETIYAEKFQGRVTITADTSTDTAYMELSSLRSEDTAVYYCARYWSYSFDYLYMPEGNDWWGQGTLVTVSSTSGQAGQHHHHHHGAYPYDVPDYAS

SEQ ID NO: 6277 - protein, 276 aa, Artificial Sequence
  source: /note="Description of Artificial Sequence: Synthetic single chain variable fragment"
QSVLTQPPAASGTPGQRVTISCSGGVSNIGSGALNWYQQLPGTAPKLLIYSYNQRPSGVSDRFSGSRSATSASLAISGLQSEDEADYYCATWDDSVNGWVFGGGTKLTVLGSRGGGGSGGGGSGGGGSLEMAQVQLVQSGAEVKKPGDSVKVSCKPSGYNFLNYGINWVRQAPGQGLEWMGWISTYTGNTNYAQKLQGRVTFTTDTSTSTAYMEMRSLRSDDTAVYYCARDLYYYEGVDYWGQGTLVTVSSTSGQAGQHHHHHHGAYPYDVPDYAS

SEQ ID NO: 6278 - protein, 274 aa, Artificial Sequence
  source: /note="Description of Artificial Sequence: Synthetic single chain variable fragment"
QAVLTQPPSVSVAPGKTARVTCGGNNIGSESVHWYQQKPGQAPVLVIYYDTDRPSGIPERFSGSHSGTTATLTISRVEAGDEADYYCQVWDSSRDHVVFGGGTKLTVLGSRGGGGSGGGGSGGGGSLEMAQVQLVQSGGGVVQPGRSLRLSCAASGFTFSSYAMHWVRQAPGKGLEWVAVISYDGSNKYYADSVKGLFTISRDNSKNTLYLQMNSLRAEDTAVYYCARSYFTSGFYDYWGQGTLVTVSSTSGQAGQHHHHHHGAYPYDVPDYAS

SEQ ID NO: 6279 - protein, 275 aa, Artificial Sequence
  source: /note="Description of Artificial Sequence: Synthetic single chain variable fragment"
QSVVTQPPSVSGAPGQRVTISCTGSSSNIGAGYDVNWYQQFPGTAPKLLIYGNSNRPSGVPDRFSGSKSGTSASLAITGLQAEDEADYYCQSYDSSLSGSYVFGTGTKVTVLGSRGGGGSGGGGSGGGGSLEMAQMQLVQSGAEVKKPGASVKVSCKASGYTLTELSMHWVRQAPGKGLEWMGGFDPEDGETIYAQKFQGRVTMTEDTSTDTAYMELSSLRSEDTAVYYCARMSSMYYDWGQGTLVTVSSTSGQAGQHHHHHHGAYPYDVPDYAS

SEQ ID NO: 6280 - protein, 269 aa, Artificial Sequence
  source: /note="Description of Artificial Sequence: Synthetic single chain variable fragment"
SYVLTQPPSVSVAPGKTARITCGGNNIGSKSVHWYQQKPGQAPVLVIYYDSDRPSGIPERFSGSNSGNTATLTISRVEAGDEADYYCQVWDSSSDYVFGTGTKVTVLGSRGGGGSGGGGSGGGGSLEMAEVQLVETGGGLVKPGGSLRLSCAASGFTVSDYYMSWIRQAPGKGLEWISYISGSGNSIYYADSVKGRFTISRDNAKNSLDLQMTSLRAEDTAVYYCARSTKFDYWGQGTLVTVSSTSGQAGQHHHHHHGAYPYDVPDYAS

SEQ ID NO: 6281 - protein, 276 aa, Artificial Sequence
  source: /note="Description of Artificial Sequence: Synthetic single chain variable fragment"
LPVLTQPPSASGTPGQRVTISCSGSSSNVGSYTVNWYRQLPGTAPTLLIYNNNQRPSGVPDRFSDSKSGTSASLTISGLQPEDEADYYCAAWDDRLGGYVFGTGTKVTVLGSRGGGGSGGGGSGGGGSLEMAEVQLVQSGAEVKKPGESLKISCKGSGYSFTNYWIGWVRQMPGKGLEWMGIIYPGDSDTRYSPSFQGQVTISADKSISTAYLQWSSLKASDTAMYYCARSTGSSHMSDEWGQGTLVTVSSTSGQAGQHHHHHHGAYPYDVPDYAS

SEQ ID NO: 6282 - protein, 273 aa, Artificial Sequence
  source: /note="Description of Artificial Sequence: Synthetic single chain variable fragment"
NFMLTQPHSVSESPGKTVTISCTGSSGSIASNYVQWYQQRPGSAPTTVIYEDNQRPSGVPDRFSGSIDSSSNSASLTISGLKTEDEADYYCQSYDSSNHWVFGGGTKLTVLGSRGGGGSGGGGSGGGGSLEMAQVQLQQWGAGLLKPSETLSLTCAVYGGSFSGYYWSWIRQPPGKGLEWIGEITHSGRSNYNPSLKSRVTISVDTSKNQFSLKLSSVTAADTAVYYCARSSIMSDYWGQGTLVTVSSTSGQAGQHHHHHHGAYPYDVPDYAS

SEQ ID NO: 6283 - protein, 276 aa, Artificial Sequence
  source: /note="Description of Artificial Sequence: Synthetic single chain variable fragment"
QSVLTQPPSVSGAPGQRVTISCTGSTSNIGAGYDVHWYQQLPGTAPKLLINNNRNRPSGVPDRFSGSKSGTSATLGITGLQTGDEADYYCGTWDGSLTGAVFGGGTKLTVLGSRGGGGSGGGGSGGGGSLEMAEVQLVQSGAEVKKPGSSVKVSCKASGGTFSSYAISWVRQAPGQGLEWMGGIIPIFGTANYAQKFQGRVTITADESTSTAYMELSSLRSEDTAVYYCARGSALDHYDRWGQGTLVTVSSTSGQAGQHHHHHHGAYPYDVPDYAS

SEQ ID NO: 6284 - protein, 274 aa, Artificial Sequence
  source: /note="Description of Artificial Sequence: Synthetic single chain variable fragment"
NFMLTQPHSVSESPGKTVTISCTRSSGSIASNYVQWYQQRPGSAPTTVIYEDNQRPSGVPDRFSGSIDSSSNSASLTISGLKTEDEADYYCQSYDSTNWVFGGGTKLTVLGSRGGGGSGGGGSGGGGSLEMAQVQLVQSGAEVKKPGSSVKVSCKASGGTFSSYAISWVRQAPGQGLEWMGGIIPIFGTANYAQKFQGRVTITADESTSTAYMELSSLRSEDTAVYYCARYNYYFNDYWGQGTLVTVSSTSGQAGQHHHHHHGAYPYDVPDYAS

SEQ ID NO: 6285 - protein, 273 aa, Artificial Sequence
  source: /note="Description of Artificial Sequence: Synthetic single chain variable fragment"
SYVLTQPPSVSVAPGKTARITCGGNNIGSKSVHWYQQKPGQAPVLVIYYDSDRPSGIPERFSGSNSGNTATLTISRVEAGDEADYYCQVWDSSSDHPYVFGTGTKVTVLGSRGGGGSGGGGSGGGGSLEMAQMQLVQSGAEVKKPGASVKVSCKASGYTFTSYGISWVRQAPGQGLEWMGWISAYNGNTNYAQKLQGRVTMTTDTSTSTAYMELRSLRSDDTAVYYCARSMFGAHDSWGQGTLVTVSSTSGQAGQHHHHHHGAYPYDVPDYAS

SEQ ID NO: 6286 - protein, 276 aa, Artificial Sequence
  source: /note="Description of Artificial Sequence: Synthetic single chain variable fragment"
QSVLTQPPSVSGAPGQRVTISCTGSSSNIGAGFDVHWYQLLPGTAPKLLIYANSNRPSGVPDRFSGSKSGTSASLAITGLLAEDEADYYCQSYDSSLSGVVFGGGTKLTVLGSRGGGGSGGGGSGGGGSLEMAQVQLVQSGAEVKKPGSSVKVSCKASGGTFSSYAISWVRQAPGQGLEWMGGIIPIFGTANYAQKFQGRVTITADESTSTAYMELSSLRSEDTAVYYCARGASFDRHDNWGQGTLVTVSSTSGQAGQHHHHHHGAYPYDVPDYAS

SEQ ID NO: 6287 - protein, 274 aa, Artificial Sequence
  source: /note="Description of Artificial Sequence: Synthetic single chain variable fragment"
NFMLTQPHSVSESPGKTVTISCTRSSGSIASNYVQWYQQRPGSSPTTVIYEDNQRPSGVPDRFSGSIDSSSNSASLTISGLKTEDEADYYCQSYDSSNWVFGGGTKLTVLGSRGGGGSGGGGSGGGGSLEMAEVQLVQSGAEVKKPGSSVKVSCKASGGTFSSYAISWVRQAPGQGLEWMGGIIPIFGTANYAQKFQGRVTITADESTSTAYMELSSLRSEDTAVYYCARSNYYYNDYWGQGTLVTVSSTSGQAGQHHHHHHGAYPYDVPDYAS

SEQ ID NO: 6288 - protein, 274 aa, Artificial Sequence
  source: /note="Description of Artificial Sequence: Synthetic single chain variable fragment"
QSVLTQPPSVSGAPGQRVTISCTGSSSNIGAGYDVHWYQQLPGTAPKLLIYGNSNRPSGVPDRFSGSKSGTSASLAITGLQAEDEADYYCQSYDSSLSGYVFGTGTKVTVLGSRGGGGSGGGGSGGGGSLEMAQVQLVQSGAEVKKPGASVKVSCKVSGYTLTELSMHWVRQAPGKGLEWMGGFDPEDGETIYAQKFQGRVTMTEDTSTDTAYMELSSLRSEDTAVYYCARYSGVYYDWGQGTLVTVSSTSGQAGQHHHHHHGAYPYDVPDYAS

SEQ ID NO: 6289 - protein, 274 aa, Artificial Sequence
  source: /note="Description of Artificial Sequence: Synthetic single chain variable fragment"
NFMLTQPHSVSGSPGKTVTISCTGSSGSIADNFVQWYQQRPGGVPTTVIFNDDERPSGVPDRFSGSIDTSSNSASLTISGLKTEDEADYYCQSYDNNNRGVFGGGTKLTVLGSRGGGGSGGGGSGGGGSLEMAQVQLVQSGAEVKKPGSSVKVSCKASGGTFSSYAISWVRQAPGQGLEWMGWMNPNSGNTGYAQKFQGRVTMTRNTSISTAYMELSNLRSEDTAVYYCARYYSYGYDWGQGTLVTVSSTSGQAGQHHHHHHGAYPYDVPDYAS

SEQ ID NO: 6290 - protein, 280 aa, Artificial Sequence
  source: /note="Description of Artificial Sequence: Synthetic single chain variable fragment"
QSVVTQPPSVSGAPGQTVTISCTGGSSNIGTGYFVNWYQQVPGKAPKLLILGNNNRPSGVPDRLSGSTSGTSASLAITGLQAEDEGTYYCQSYDSSLSGYVFGTGTKVTVLGSRGGGGSGGGGSGGGGSLEMAQVQLQQSGPGLVKPSQTLSLTCGISGDSVSTNSVAWHWIRQSPSRGLEWLGRTYYRSKWSNDYGVSVKSRITIIPDTSKNQFSLQLNSVTPEDTAVYYCARSSSWYQIFDYWGQGTLVTVSSTSGQAGQHHHHHHGAYPYDVPDYAS

SEQ ID NO: 6291 - protein, 279 aa, Artificial Sequence
  source: /note="Description of Artificial Sequence: Synthetic single chain variable fragment"
NFMLTQPHSVSESPGKTVTISCTGSSDSIANNYVQWYQQRPGSAPTNVIYEDVQRPSGVPDRFSGSIDSSSNSASLTISGLKTEDEAVYYCQSYHSDNRWVFGGGTKLTVLGSRGGGGSGGGGSGGGGSLEMAQVQLVESGGGLVQPGGSLRLSCAASGFTFSSYAMSWVRQAPGKGLEWVSAISGSGGSTYYADSVKGRFTISRDNSKNTLYLQMNSLRAEDTAVYYCARSGAYWDYSVYDEWGQGTLVTVSSTSGQAGQHHHHHHGAYPYDVPDYAS

SEQ ID NO: 6292 - protein, 273 aa, Artificial Sequence
  source: /note="Description of Artificial Sequence: Synthetic single chain variable fragment"
QSVLTQPPSVSVSPGQTATIACSGHKLGDKYASWYQQKSGQSPVLIIYQDNKRPSGIPERFSGSNSGNTATLTISGTQALDEADYYCQAWDSSTYVAFGGGTKLTVLGSRGGGGSGGGGSGGGGSLEMAQVQLQESGPGLVKPSETLSLTCVVSGGSISSSNWWSWVRQPPGKGLEWIGEIYHSGSPNYNPSLKSRVTISVDKSKNQFSLKLSSVTAADTAVYYCARMTTHTFGYDAWGQGTLVTVSSTSGQAGQHHHHHHGAYPYDVPDYAS

SEQ ID NO: 6293 - protein, 270 aa, Artificial Sequence
  source: /note="Description of Artificial Sequence: Synthetic single chain variable fragment"
QPVLTQPPSVSVAPGKTATITCGGNNIGSESVHWYHQKPGQAPVLVIYDDAGRPSGIPERFTGSNSGNTATLTISRVEAGDEADYYCQVWDRNSAQFVFGPGTKVTVLGSRGGGGSGGGGSGGGGSLEMAEVQLVQSGAEVKKPGASVKVSCKASGYTFTSYGISWVRQAPGQGLEWMGWISAYNGNTNYAQKLQGRVTMTTDTSTSTAYMELRSLRSDDTAVYYCARGVHLDWWGQGTLVTVSSTSGQAGQHHHHHHGAYPYDVPDYAS

SEQ ID NO: 6294 - protein, 282 aa, Artificial Sequence
  source: /note="Description of Artificial Sequence: Synthetic single chain variable fragment"
QSVVTQPPSASGTPGQRVTISCSGSSSNIGSNYVYWYQQLPGTAPKLLIYSNNQRPSGVPDRFSGSKSGTSASLAISGLRSEDEADYYCAAWDDSLSGYVFGTGTKLTVLGSRGGGGSGGGGSGGGGSLEMAQVQLQQWGAGLLKPSETLSLTCAVYGGSFSGYYWSWIRQPPGKGLEWIGEINHSGSTNYNPSLKSRVTISVDTSKNQFSLKLSSVTAADTAVYYCARLYEGGYHGWGSWLSSDSWGQGTLVTVSSTSGQAGQHHHHHHGAYPYDVPDYAS

SEQ ID NO: 6295 - protein, 275 aa, Artificial Sequence
  source: /note="Description of Artificial Sequence: Synthetic single chain variable fragment"
QSVLTQPPSASGTPGQRVTISCSGSSSNIGSNTVNWYQQLPGTAPKLLIYSNNQRPSGVPDRFSGSKSGTSASLAISGLQSEDEADYYCAAWDDSLNGYWVFGGGTKLTVLGSRGGGGSGGGGSGGGGSLEMAQVQLQQWGAGLLKPSETLSLTCAVYGGSFSGYYWSWIRQPPGKGLEWIGEINHSGSTNYNPSLKSRVTISVDTSKNQFSLKLSSVTAADTAVYYCAREGAFDAFDIWGQGTMVTVSSTSGQAGQHHHHHHGAYPYDVPDYAS

SEQ ID NO: 6296 - protein, 277 aa, Artificial Sequence
  source: /note="Description of Artificial Sequence: Synthetic single chain variable fragment"
SYELTQPPSASGTPGQRVTISCSGSSSNIGSNYVYWYQQLPGTAPKLFIYRNNQRPSGVPDRFSGSKSGTSASLAISGLRSEDEADYYCAAWDDSLSGYLFGTGTKVTVLGSRGGGGSGGGGSGGGGSLEMAEVQLVESGGGLVQPGRSLRLSCAASGFTFDDYAMHWVRQAPGKGLEWVSGISWNSGSIGYADSVKGRFTISRDNAKNSLYLQMNSLRAEDTALYYCANGDSNYYYGMDVWGQGTTVTVSSTSGQAGQHHHHHHGAYPYDVPDYAS

SEQ ID NO: 6297 - protein, 279 aa, Artificial Sequence
  source: /note="Description of Artificial Sequence: Synthetic single chain variable fragment"
QSALTQPASVSGSPGQSMSCTGTSSDIGGYNYVSWYQQHPGKAPKLMIYDVSNRPSGVSNRFSGSKSGNTASLTISGLQAEDEADYYCISYTRTWNPYVFGSGTKVTVLGSRGGGGSGGGGSGGGGSLEMAEVQLVQSGGGVVQPGGSLRLSCAASGFTFDDYAMHWVRQAPGKGLEWVSLISGDGGSTYYADSVKGRFTISRDNSKNSLYLQMNSLRTEDTALYYCAKDRAAAGYYYYGMDVWGQGTTVTVSSTSGQAGQHHHHHHGAYPYDVPDYAS

SEQ ID NO: 6298 - protein, 275 aa, Artificial Sequence
  source: /note="Description of Artificial Sequence: Synthetic single chain variable fragment"
LPVLTQPPSVSVSPGQTAIITCSGDKLGEKYVSWYQQKPGQSPVLVIDQDTRRPSGIPERFSGSNSGTTATLTISGTQAMDEADYYCQAWDRGVVFGGGTKLTVLGSRGGGGSGGGGSGGGGSLEMAEVQLVESGGDLVQPGRSLRLSCAASGFTFNDYAMHWVRQAPGKGLEWVSGISWSGNNIGYADSVKGRFTISRDNAKNSLYLQMNSLRAEDTALYYCAKDSIRYGITWGGFDYWGQGTLVTVSSTSGQAGQHHHHHHGAYPYDVPDYAS

SEQ ID NO: 6299 - protein, 275 aa, Artificial Sequence
  source: /note="Description of Artificial Sequence: Synthetic single chain variable fragment"
QPVLTQPPSVSKGLRQTATLTCTGNSNNVGNLGVAWLQQHQGHPPKLLSYRNNNRPSGISERLSASRSGNTASLTITGLQPEDEADYYCSAWDSSLSAWVFGGGTKLTVLGSRGGGGSGGGGSGGGGSLEMAEVQLVESGGVVVQPGGSLRLSCAASGFTFDDYAMHWVRQAPGKGLEWVSLINWDGGSTYYADSVKGRFTISRDNSKNSLYLQMNSLRAEDTALYYCAKGMGLRAFDYWGQGTLVTVSSTSGQAGQHHHHHHGAYPYDVPDYAS

SEQ ID NO: 6300 - protein, 279 aa, Artificial Sequence
  source: /note="Description of Artificial Sequence: Synthetic single chain variable fragment"
QSVLTQPPSASGTPGQRVTISCSGSSSNIGSNTVNWYQQLPGTAPKLLIYSNDQRPSGVPDRFSGSKSGTSASLAISGLQSEDEADYYCASWDDSLNGRYVFGTGTKVTVLGSRGGGGSGGGGSGGGGSLEMAQVQLVQSGAEVRKPGASVKVSCKTSGYTFSWYAIHWVRQAPGQRLEWMGWINAGNGNTKYSQKFQGRVSLTRDTSASTAYMELSSLRSDDTAVYYCARPDNYGSGGDVFDRGQGTMVTVSSTSGQAGQHHHHHHGAYPYDVPDYAS

SEQ ID NO: 6301 - protein, 273 aa, Artificial Sequence
  source: /note="Description of Artificial Sequence: Synthetic single chain variable fragment"
NFMLTQPHSVSESPGKTVTISCTRSSGSIASNFVQWYQQRPGSAPTPMIYEDNNRPPGVPDRFSASVDSSSNSASLTISGLKTEDEADYYCQSYDTSNVVFGGGTKLTVLGSRGGGGSGGGGSGGGGSLEMAEVQLVESGGGLVQPGGSLRLSCAASGFTFSSYEMNWVRQAPGKGLEWVSYISSSGSTIYYADSVKGRFTISRDNAKNSLYLQMNSLRAEDTAVYYCARWDYGMDVWGQGTTVTVSSTSGQAGQHHHHHHGAYPYDVPDYAS

SEQ ID NO: 6302 - protein, 278 aa, Artificial Sequence
  source: /note="Description of Artificial Sequence: Synthetic single chain variable fragment"
QAVLTQPPSASGAPGQRVTVSCSGSNSNIGSNYVNWYQQFPGTAPKLLMYSSSQRPSGVPDRFSGSKSGTSASLAISGLHSEDEADYYCATWDDSLNAWVFGGGTKLTVLGSRGGGGSGGGGSGGGGSLEMAEVQLVQSGAEVRKPGASVKVSCKTSGYTFTWYAIHWVRQAPGQRLEWMGWINAGSGNTKYSQKFQGRVTLTRDTSASTAYMELSSLRSDDTAVYYCARPNNYGSGGDVFDRGQGTMVTVSSTSGQAGQHHHHHHGAYPYDVPDYAS

SEQ ID NO: 6303 - protein, 278 aa, Artificial Sequence
  source: /note="Description of Artificial Sequence: Synthetic single chain variable fragment"
QSVVTQPPSVSAAPGQKVTISCSGSSSNIGNNYVSWYQQLPGTAPKLLIYDNNKRPSGIPDRFSGSKSGTSATLGITGLQTGDEADYYCGTWDSSLSAYVFGTGTKVTVLGSRGGGGSGGGGSGGGGSLEMAQVQLVQSGAEVKKPGASVKVSCKASGYTFTNYALHWVRQAPGQGLEWMAWINGGNGNTKYSQNFQGRVTITRDTSASTAYMELSSLRSEDTAVYYCAKPEETAGTIHFDYWGQGTPVTVSSTSGQAGQHHHHHHGAYPYDVPDYAS

SEQ ID NO: 6304 - protein, 283 aa, Artificial Sequence
  source: /note="Description of Artificial Sequence: Synthetic single chain variable fragment"
QAVLTQPHSVSESPGKTVTISCTRSSGSIASNYVQWYQQRPGSAPTTVIYEDNQRPSGVPDRFSGSIDSSSNSASLTISGLKTEDEADYYCQSYDSTITVFGGGTKLTVLGSRGGGGSGGGGSGGGGSLEMAQVQLVQSGAEVKKPGSSVKVSCKASGGTFSSYAISWVRQAPGQGLEWMGGIIPIFGTANYAQKFQGRVTITADESTSTAYMELSSLRSEDTAVYYCAGEGYYDSSGYSNGDAFDRVGQGTMVTVSSTSGQAGQHHHHHHGAYPYDVPDYAS

SEQ ID NO: 6305 - protein, 273 aa, Artificial Sequence
  source: /note="Description of Artificial Sequence: Synthetic single chain variable fragment"
NFMLTQPHSVSESPGKTVTISCTRSSGSIASNYVQWYQQRPGSAPTTVIYEDNQRPSGVPDRFSGSIDSSSNSASLTISGLKTEDEADYYCQSYDSSNVVFGGGTKVTVLGSRGGGGSGGGGSGGGGSLEMAEVQLVESGGGLVQPGGSLRLSCAASGFTFSSYEMNWVRQAPGKGLEWVSYISSSGSTIYYADSVKGRFTISRDNAKNSLYLQMNSLRAEDTAVYYCARWDYGMDVWGQGTTVTVSSTSGQAGQHHHHHHGAYPYDVPDYAS

SEQ ID NO: 6306 - protein, 276 aa, Artificial Sequence
  source: /note="Description of Artificial Sequence: Synthetic single chain variable fragment"
SYVLTQPPSVSVSPGQTASITCSGDRLTNKYVSWYQQKPGQSPVLVIYEDAKRPSGIPARFSGSNSGNTATLTISGTQAMDESEYYCQAWDSSVVVFGGGTKLTVLGSRGGGGSGGGGSGGGGSLEMAEVQLVESGGGLVQPGRSLRLSCAASGFTFDDYAMHWVRQAPGKGLEWVSGISWNSGSIGYADSVKGRFTISRDNAKNSLYLQMNSLRDEDTALYYCAKDRGGGVIVKDAFDIWGQGTMVTVSSTSGQAGQHHHHHHGAYPYDVPDYAS

SEQ ID NO: 6307 - protein, 275 aa, Artificial Sequence
  source: /note="Description of Artificial Sequence: Synthetic single chain variable fragment"
SYELTQPPAASGTPGQRVTISCSGGVSNIGSGALNWYQQLPGTAPKLLIYSYNQRPSGVSDRFSGSRSATSASLAISGLQSEDEADYYCATWDDSVNGWVFGGGTKLTVLGSRGGGGSGGGGSGGGGSLEMAEVQLVESGAEVKKPGDSVKVSCKPSGYNFLNYGINWVRQAPGQGLEWMGWISTYTGNTNYAQKLQGRVTFTTDTSTSTAYMEMRSLRSDDTAVYYCARQQGGGWYDVWGQGTLVTVSSTSGQAGQHHHHHHGAYPYDVPDYAS

SEQ ID NO: 6308 - protein, 281 aa, Artificial Sequence
  source: /note="Description of Artificial Sequence: Synthetic single chain variable fragment"
QSVVTQPPSVSAAPGEKVTISCSGSNFNVGNNDVSWYQQLPGAAPKLLIYDNNKRPSGIPDRFSGSKSGTSATLDITGLHSDDEADYYCGTWDSSLNTGGVFGTGTKVTVLGSRGGGGSGGGGSGGGGSLEMAEVQLVQSGAEVKKPGASVKVSCKASGYTFTSYTISWVRQAPGQGLEWMGWISTYNGLTNYAQNLQGRVTMTTDTFTTTAYMELRSLRSDDTAVYYCVREGSPDYGDFASFDYWGQGTLVTVSSTSGQAGQHHHHHHGAYPYDVPDYAS

SEQ ID NO: 6309 - protein, 281 aa, Artificial Sequence
  source: /note="Description of Artificial Sequence: Synthetic single chain variable fragment"
QSVLTQPPSVSAPPGQKVTISCSGSSSNIGNNYVSWYQQFPGTAPKLLIYDNNKRPSGISDRFSGSKSGTSATLGIAGLQTGDEADYYCGTWDTSLSGFYVFGSGTKVTVLGSRGGGGSGGGGSGGGGSLEMAEVQLVQSGAEVKKPGASVKVSCKASGYTFTSYTISWVRQAPGQGLEWMGWISTYNGLTNYAQNLQGRVTMTTDTFTTTAYMELRSLRSDDTAVYYCVREGSPDYGDFASFDYWGQGTLVTVSSTSGQAGQHHHHHHGAYPYDVPDYAS

SEQ ID NO: 6310 - protein, 280 aa, Artificial Sequence
  source: /note="Description of Artificial Sequence: Synthetic single chain variable fragment"
LPVLTQPPSASATPGQRVTISCSGTTSNIGSNTVHWYQQLPGTAPKLLIYNNNQRPSGVPDRFSGSKSGTSASLAISGLRSEDEATYSCATWDDSLSGVVFGGGTKLTVLGSRGGGGSGGGGSGGGGSLEMAEVQLVQSGAEVKKPGSSVKVSCKASGGTFSSYAISWVRQAPGQGLEWMGGIIPIFGTANYAQKFQGRVTITADESTSTAYMELSSLRSEDTAVYYCARDPAYGDYEYDAFDRVGQGTMVTVSSTSGQAGQHHHHHHGAYPYDVPDYAS

SEQ ID NO: 6311 - protein, 275 aa, Artificial Sequence
  source: /note="Description of Artificial Sequence: Synthetic single chain variable fragment"
QSVLTQPPSASGTPGQRVTISCSGSSSNIGTNGVNWFQQFPGTAPKLLIYTNDQRPSGVPDRFSGSKSGTSASLAISGLQSADEADYYCAVWDHSLNGPVFGGGTKLTVLGSRGGGGSGGGGSGGGGSLEMAQVQLVQSGAEVKKPGSSVKVSCKASGGTFSSYAISWVRQAPGQGLEWMGGIIPIFGTANYAQKFQGRVTITADESTSTAYMELSSLRSEDTAVYYCARGAGFDAFDIWGQGTMVTVSSTSGQAGQHHHHHHGAYPYDVPDYAS

SEQ ID NO: 6312 - protein, 273 aa, Artificial Sequence
  source: /note="Description of Artificial Sequence: Synthetic single chain variable fragment"
QAVLTQPPSASGTPGQRVTISCSGSSSNIGSNTVNWYQQLPGTAPKLLIYSNNQRPSGVPDRFSGSKSGTSASLAISGLQSEDETDYYCAAWDDSLNGYVFGTGTKVTVLGSRGGGGSGGGGSGGGGSLEMAQVQLQQWGAGLLKPSETLSLTCAVYGGSFSGYYWSWIRQPPGKGLEWIGEINHSGSTNYNPSLKSRVTISVDTSKNQFSLKLSSVTAADTAVYYCAREGLDAFDIWGQGTMVTVSSTSGQAGQHHHHHHGAYPYDVPDYAS

SEQ ID NO: 6313 - protein, 273 aa, Artificial Sequence
  source: /note="Description of Artificial Sequence: Synthetic single chain variable fragment"
QAVLTQPPSASGTPGQRVTISCSGSSSNIGSNTVNWYQQLPGTAPKLLMYSNDQRPSGVPDRFSGSKSGTSASLAISGLQSEDEADYYCAAWDDSLNGYVFAAGTQLTVLSSRGGGGSGGGGSGGGGSLEMAQVQLQQWGAGLLKPSETLSLTCAVYGGSFSGYYWSWIRQPPGKGLEWIGEINHSGSTNYNPSLKSRVTISVDTSKNQFSLKLSSVTAADTAVYYCAREGLDAFDRVGQGTMVTVSSTSGQAGQHHHHHHGAYPYDVPDYAS

SEQ ID NO: 6314 - protein, 281 aa, Artificial Sequence
  source: /note="Description of Artificial Sequence: Synthetic single chain variable fragment"
QSVVTQPPSVSAAPGQKVTISCSGSSSNIGNNYVSWYQQLPGTAPKLLIYDNNKRPSGIPDRFSGSKSGTSATLGITGLQTGDEADYYCGTWDSSLSAAYVFGTGTKVTVLGSRGGGGSGGGGSGGGGSLEMAQVQLVQSGAEVKKPGASVKVSCKASGYSFTSYTISWVRQAPGQGLEWMGWVSTYNGLRNYAQNLQGRVTMTTDTLTTTAYMELRSLRSDDTAVYYCVREGSPDYGDFAAFDYWGQGTLVTVSSTSGQAGQHHHHHHGAYPYDVPDYAS

SEQ ID NO: 6315 - protein, 272 aa, Artificial Sequence
  source: /note="Description of Artificial Sequence: Synthetic single chain variable fragment"
QAVLTQPPSASETPGQRVTISCSGSRSNIGTNIVHWYQQRPGMAPKLLTYGSRRPSGVPDRFSGSKFGTSASLAISGLQSEDEADYYCAAWDDSLNGPAFGGGTKLTVLGSRGGGGSGGGGSGGGGSLEMAQVQLQQWGAGLLKPSETLSLTCAVYGGSFSGYYWSWIRQPPGKGLEWIGEINHSGSTNYNPSLKSRVTISVDTSKNQFSLKLSSVTAADTAVYYCARDGGGYFDYWGQGTLVTVSSTSGQAGQHHHHHHGAYPYDVPDYAS

SEQ ID NO: 6316 - protein, 278 aa, Artificial Sequence
  source: /note="Description of Artificial Sequence: Synthetic single chain variable fragment"
QSVLTQPPSVSGAPGQRVTISCTGSSSNIGARYDVHWYQQLPGTAPRLLISANYDRPSGVPDRFSGSKSGTSASLAITGLQAEDEADYYCQSYDSSVSAWVFGGGTKVTVLGSRGGGGSGGGGSGGGGSLEMAEVQLVQSGAEVKEPGASVRISCQASGYNFISYYMHWVRQAPGQGLEWMGTINPGSGETDYSQKLQGRVTMTRDPSTGTFDMGLSSLTSGDTAVYYCATGLIRGASDAFNRGRGTMVTVSSTSGQAGQHHHHHHGAYPYDVPDYAS

SEQ ID NO: 6317 - protein, 275 aa, Artificial Sequence
  source: /note="Description of Artificial Sequence: Synthetic single chain variable fragment"
QPVLTQPPSVSVSPGQTAAIPCSGDKLGDKFASWYQQKPGQSPVLVIYQDTKRPSGIPERFSGSNSGNTATLTISGTQAMDEADYYCQTWASGRVVFGGGTKLTVLGSRGGGGSGGGGSGGGGSLEMAQVQLQQSGPGLVKPSQTLSLTCAISGDSVSSNSAAWNWIRQSPSRGLEWLGRTYYRSKWYNDYAVSVKSRITINPDTSKNQFSLQLNSVTPEDTAVYYCARERSGWKGFDYWGQGTLVTVSSTSGQAGQHHHHHHGAYPYDVPDYAS

SEQ ID NO: 6318 - protein, 278 aa, Artificial Sequence
  source: /note="Description of Artificial Sequence: Synthetic single chain variable fragment"
DVVMTQSPPSLSVTPGEPASITCRSSQSLLERNAYNYLDWYLQRPGQSPQLLIYLGSNRAAGVPDRFSGSGSGRDFTLKISRVEPEDVGVYYCMQALQAPFTFGGGTKVEIKRSRGGGGSGGGGSGGGGSLEMAEVQLVQSGGGLVQPGGSLRLSCAASGFTFSSYAMSWVRQAPGKGLEWVSAISGSGGSTYYADSVKGRFTISRDNSKNTLYLQMNSLRAEDTAVYYCAKWGPFQDAFDIWGQGTMVTVSSTSGQAGQHHHHHHGAYPYDVPDYAS

SEQ ID NO: 6319 - protein, 281 aa, Artificial Sequence
  source: /note="Description of Artificial Sequence: Synthetic single chain variable fragment"
QAVLTQPASVSGSPGQSITISCTGTSSDVGGYNYVSWYQQHPGKAPKLMIYEVSNRPSGVSNRFSGSKSGNTASLTISGLQAEDEADYYCSSYTSSSTPYVFGAGTKVTVLGSRGGGGSGGGGSGGGGSLEMAEVQLVESGGGLVQPGRSLRLSCAASGFTFDDYAMHWVRQAPGKGLEWVSGISWNSGSIGYADSVKGRFTISRDNAKNSLYLQMNSLRAEDTALYYCAKARWTAVASDHHFDYWGQGTLVTVSSTSGQAGQHHHHHHGAYPYDVPDYAS

SEQ ID NO: 6320 - protein, 273 aa, Artificial Sequence
  source: /note="Description of Artificial Sequence: Synthetic single chain variable fragment"
QAVLTQPPSASGTPGQRVTISCSGSSSNIGSNTVNWYQQLPGTAPKLLIYSNNQRPSGVPDRFSGSKSGTSASLAISGLQSEDEADYYCAAWDDSLNGYVFGTGTKLTVLGSRGGGGSGGGGSGGGGSLEMAEVQLVQSGAEVKKPGSSVKVSCKASGGTFSSYAISWVRQAPGQGLEWMGGIIPIFGTANYAQKFQGRVTITADESTSTAYMELSSLRSEDTAVYYCARDWDYMDVWGKGTTVTVSSTSGQAGQHHHHHHGAYPYDVPDYAS

SEQ ID NO: 6321 - protein, 284 aa, Artificial Sequence
  source: /note="Description of Artificial Sequence: Synthetic single chain variable fragment"
SYELTQPPSASGTPGQRVTISCSGSSSNIGSNTVNWYQQLPGTAPKLLIYSNNQRPSGVPDRFSGSKSGTSASLAISGLQSEDEADYYCAAWDDSLNGYVFGTGTKVTVLGSRGGGGSGGGGSGGGGSLEMAEVQLVESGAEVKKPGASVKVSCKASGYTFTSYGISWVRQAPGQGLEWMGWISAYNGNTNYAQKLQGRVTMTTDTSTSTAYMELRSLRSDDTAVYYCARDLSRGANPHYYYYYGMDVWGQGTTVTVSSTSGQAGQHHHHHHGAYPYDVPDYAS

SEQ ID NO: 6322 - protein, 285 aa, Artificial Sequence
  source: /note="Description of Artificial Sequence: Synthetic single chain variable fragment"
QSVLTQPPSVSGAPGQRVTVSCTGSRSNIGAGYDVHWYQQLPGTAPKLLIYGNSNRPPGVPDRFSGSKSGTSASLVITGLQAEDAADYYCQSYDNTVRESPYVFGTGTKVTVLGSRGGGGSGGGGSGGGGSLEMAEVQLVQSGAEVKKPGASVKVSCKVSGYTLTELSMHWVRQAPGKGLEWMGGFDPEDGETIYAQKFQGRVTMTEDTSTDTAYMELSSLRSEDTAVYYCATESNLVSRHYYYYGMDVWGQGTTVTVSSTSGQAGQHHHHHHGAYPYDVPDYAS

SEQ ID NO: 6323 - protein, 289 aa, Artificial Sequence
  source: /note="Description of Artificial Sequence: Synthetic single chain variable fragment"
LPVLTQPPSASGTPGQRVTISCSGTSSNIGSNSVDWYQQLPGTAPKLLIYSNNQRPSGVPDRISGSKSGTSASLAISGLQSEDEADYYCAAWDDSLNGYVFGTGTKVTVLGSRGGGGSGGGGSGGGGSLEMAEVQLVQSGAEVKKPGASVKVSCKASGYTFTGYYMHWVRQAPGQGLEWMGWINPNSGGTNYAQKFQGRVTMTRDTSISTAYMELSRLRSDDTAVYYCARDYGYYGSGSYSSGPLYYYYGMDVWGQGTTVTVSSTSGQAGQHHHHHHGAYPYDVPDYAS

SEQ ID NO: 6324 - protein, 284 aa, Artificial Sequence
  source: /note="Description of Artificial Sequence: Synthetic single chain variable fragment"
QAVLTQPPSASGTPGQRVTISCSGSSSNIGSNTVNWYQQLPGTAPKLLMYNNDQRPSGVPDRFSGSKSGTSASLAISGLQSEDEADYYCAAWDDSLNGYVFGPGTKVTVLGSRGGGGSGGGGSGGGGSLEMAQVQLVESGAEVKKPGASVKVSCKASGYTFTSYGISWVRQAPGQGLEWMGWISAYNGNTNYAQKLQGRVTMTTDTSTSTAYMELRSLRSDDTAVYYCARDLSRGANPHYYYYYGMDVWGQGTTVTVSSTSGQAGQHHHHHHGAYPYDVPDYAS

SEQ ID NO: 6325 - protein, 276 aa, Artificial Sequence
  source: /note="Description of Artificial Sequence: Synthetic single chain variable fragment"
NFMLTQPHAVSESPGKTVTISCTRSSGSIASNYVQWYQQRPGSSPRTVIYEDNQRPSGVPGRFSGSIDSSSNSASLTISGLKTEDEADYYCQSYDSTSVLFGGGTKLTVLGSRGGGGSGGGGSGGGGSLEMAEVQLVQSGAEVKKPGSSVKVSCKASGGTFSSNSLSWVRQAPGQGLEWMGRIFPILGITNYAQKFQGRVTITADKSTSTAYMELSSLRSEDTAVYYCARGNYQWYDAFDVGQGTMVTVSSTSGQAGQHHHHHHGAYPYDVPDYAS

SEQ ID NO: 6326 - protein, 273 aa, Artificial Sequence
  source: /note="Description of Artificial Sequence: Synthetic single chain variable fragment"
QPVLTQPPSVSVVPGKTARITCGGKNIGSKSVHWYQQKPGQAPVVVIHYDSDRPSGIPERFSGSNSGNTATLTISRVEAGDEADYYCQVWDSSSDHPYVFGTGTKVTVLGSRGGGGSGGGGSGGGGSLEMAQVQLVQSGAEVKKPGASVKVSCKASGYTFTNYGISWVRQAPGQGLEWMGWISAYNGNTNYAHKLQGRVTMTTDTSTSTANMELRSLRPDDTAVYYCARSYFGSHDYWGQGTLVTVSSTSGQAGQHHHHHHGAYPYDVPDYAS

SEQ ID NO: 6327 - protein, 278 aa, Artificial Sequence
  source: /note="Description of Artificial Sequence: Synthetic single chain variable fragment"
SYVLTQPPSVSVAPGKTARISCGGNDIGSKSVFWYQQRPGQAPVLVVYDDSDRPSGLPERFSGFNSGNTATLTISRVEAGDEADYYCQVWDSSSDHYVFGTGTKVTVLGSRGGGGSGGGGSGGGGSLEMAQVQLVESGGGLVQPGRSLRLSCAASGFTFDDYAMHWVRQAPGKGLEWVSGISWNSGSIGYADSVKGRFTISRDNAKNSLYLQMNSLRAEDTALYYCAKDITYGSGSYGAFDIWGQGTMVTVSSTSGQAGQHHHHHHGAYPYDVPDYAS

SEQ ID NO: 6328 - protein, 244 aa, Artificial Sequence
  source: /note="Description of Artificial Sequence: Synthetic single chain variable fragment"
SYVLTQPPSVSVAPGKTARITCGGNNIGSKSVHWYQQKPGQAPVLVIYYDSDRPSGIPERFSGSNSGNTATLTISRVEAGDEADYYCQVWDSSSDYVFGTGTKVTVLGSRGGGGSGGGGSGGGGSLEMAEVQLVETGGGLVKPGGSLRLSCAASGFTVSDYYMSWIRQAPGKGLEWISYISGSGNSIYYADSVKGRFTISRDNAKNSLDLQMTSLRAEDTAVYYCARSTKFDYWGQGTLVTVSS

SEQ ID NO: 6329 - protein, 257 aa, Artificial Sequence; identical to SEQ ID NO: 6219
  source: /note="Description of Artificial Sequence: Synthetic single chain variable fragment"

SEQ ID NO: 6330 - protein, 256 aa, Artificial Sequence
  source: /note="Description of Artificial Sequence: Synthetic single chain variable fragment"
SRAAQPAMAQVQLQQSGAELVKPGASVKISCKASGYSFTGYFMNWVKQSHGKSLEWIGRIHPYDGDTFYNQNFKDKATLTVDKSSNTAHMELLSLTSEDFAVYYCTRYDGSRAMDYWGQGTTVTVSSGGGGSGGGGSGGGGSDIELTQSPASLAVSLGQRAIISCKASQSVSFAGTSLMHWYHQKPGQQPKLLIYRASNLEAGVPTRFSGSGSKTDFTLNIHPVEEEDAATYYCQQSREYPYTFGGGTKLEIKRAA

SEQ ID NO: 6331 - protein, 504 aa, Artificial Sequence
  source: /note="Description of Artificial Sequence: Synthetic single chain variable fragment"
QVQLQESGPGLVKPSQTLSLTCTVSGGSISSGAYYWTWIRQHPGKGLEWIGYIYYSGSTYYNPSLKSRVSISIDTSKNQFSLKLSSVTAADTAVYYCARGSSSWFDYWGQGTLVTVSSGGGGSGGGGSGGGGSQSVLTQPPSVSEAPRQRVTISCSGSSSNIGNNAVNWYQQLPGKAPKLLIYYDDMLSSGVSDRFSGSKSGTSASLAISGLQSEDEADYYCAAWDDSLNGVVFGGGTKLTVLSGGGGSEVQLVESGGGLVQPGGSLKLSCAASGFTFNKYAMNWVRQAPGKGLEWVARIRSKYNNYATYYADSVKDRFTISRDDSKNTAYLQMNNLKTEDTAVYYCVRHGNFGNSYISYWAYWGQGTLVTVSSGGGGSGGGGSGGGGSQTVVTQEPSLTVSPGGTVTLTCGSSTGAVTSGNYPNWVQQKPGQAPRGLIGGTKFLAPGTPARFSGSLLGGKAALTLSGVQPEDEAEYYCVLWYSNRWVFGGGTKLTVLHHHHHH

SEQ ID NO: 6332 - protein, 237 aa, Artificial Sequence
  source: /note="Description of Artificial Sequence: Synthetic single chain variable fragment"
QAVVTQEPSLTVSPGGTVTLTCGSSTGAVTTSNYASWVQQKPGQAPRGLIGGTNNRAPGVPARFSGSLLGGKAALTISGAQPEDEAEYYCVLWYSDHWVFGGGTKLTVLGGGGSGGGGSGGGGSQVQLQESGPGLVKPSETLSLTCTVSGFLLTDYGVNWLRQPPGKGLEWIGVLWGDGITDYNPSLKSRVTISKDTSKNQFSLKLSSVTAADTAVYYCVTGLFDYWGQGTLVTVSS

SEQ ID NO: 6333 - protein, 237 aa, Artificial Sequence
  source: /note="Description of Artificial Sequence: Synthetic single chain variable fragment"
QAVVTQEPSLTVSPGGTVTLTCGSSTGAVTTSNYASWVQQKPGQAPRGLIGGTNNRAPGVPARFSGSLLGGKAALTISGAQPEDEAEYYCVLWYSDHWVFGGGTKLTVLGGGGSGGGGSGGGGSQVQLQESGPGLVKPSETLSITCTVSGFLLTDYGVNWVRQPPGKGLEWLGVLWGDGITDYNPSLKSRLTVSKDTSKNQVSLKMSSLTAADTAVYYCVTGLFDYWGQGTLLTVSS

SEQ ID NO: 6334 - protein, 237 aa, Artificial Sequence
  source: /note="Description of Artificial Sequence: Synthetic single chain variable fragment"
QAVVTQEPSLTVSPGGTVTLTCGSSTGAVTTSNYASWVQQKPGQAFRGLIGGTNNRAPGVPARFSGSLLGGKAALTISGAQPEDEAEYYCVLWYSDHWVFGGGTKLTVLGGGGSGGGGSGGGGSQVQLQESGPGLVKPSETLSLTCTVSGFLLTDYGVNWLRQPPGKGLEWIGVLWGDGITDYNPSLKSRVTISKDTSKNQFSLKLSSVTAADTAVYYCVTGLFDYWGQGTLVTVSS

SEQ ID NO: 6335 - protein, 237 aa, Artificial Sequence
  source: /note="Description of Artificial Sequence: Synthetic single chain variable fragment"
QAVVTQEPSLTVSPGGTVTLTCGSSTGAVTTSNYASWVQQKPGQAFRGLIGGTNNRAPGVPARFSGSLLGGKAALTISGAQPEDEAEYYCVLWYSDHWVFGGGTKLTVLGGGGSGGGGSGGGGSQVQLQESGPGLVKPSETLSITCTVSGFLLTDYGVNWVRQPPGKGLEWLGVLWGDGITDYNPSLKSRLTVSKDTSKNQVSLKMSSLTAADTAVYYCVTGLFDYWGQGTLLTVSS

SEQ ID NO: 6336 - protein, 237 aa, Artificial Sequence
  source: /note="Description of Artificial Sequence: Synthetic single chain variable fragment"
QAVVTQEPSLTVSPGGTVTLTCGSSTGAVTTSNYASWVQQKPDHLFRGLIGGTNNRAPGVPARFSGSLLGGKAALTISGAQPEDEAEYYCVLWYSDHWVFGGGTKLTVLGGGGSGGGGSGGGGSQVQLQESGPGLVKPSETLSLTCTVSGFLLTDYGVNWLRQPPGKGLEWIGVLWGDGITDYNPSLKSRVTISKDTSKNQFSLKLSSVTAADTAVYYCVTGLFDYWGQGTLVTVSS

SEQ ID NO: 6337 - protein, 237 aa, Artificial Sequence
  source: /note="Description of Artificial Sequence: Synthetic single chain variable fragment"
QAVVTQEPSLTVSPGGTVTLTCGSSTGAVTTSNYASWVQQKPDHLFRGLIGGTNNRAPGVPARFSGSLLGGKAALTISGAQPEDEAEYYCVLWYSDHWVFGGGTKLTVLGGGGSGGGGSGGGGSQVQLQESGPGLVKPSETLSITCTVSGFLLTDYGVNWVRQPPGKGLEWLGVLWGDGITDYNPSLKSRLTVSKDTSKNQVSLKMSSLTAADTAVYYCVTGLFDYWGQGTLLTVSS

SEQ ID NO: 6338 - protein, 241 aa, Artificial Sequence
  source: /note="Description of Artificial Sequence: Synthetic single chain variable fragment"
QVQLVESGPGVVQPGRSLRISCAVSGFSVTNYGVHWVRQPPGKGLEWLGVIWAGGITNYNSAFMSRLTISKDNSKNTVYLQMNSLRAEDTAMYYCASRGGHYGYALDYWGQGTLVTVSSGSTSGSGKPGSSEGSTKGEIVMTQTPATLSVSAGERVTITCKASQSVSNDVTWYQQKPGQAPRLLIYSASNRYSGVPARFSGSGYGTEFTFTISSVQSEDFAVYFCQQDYSSFGQGTKLEIK

SEQ ID NO: 6339 - protein, 249 aa, Artificial Sequence
  source: /note="Description of Artificial Sequence: Synthetic single chain variable fragment"
EVKLVESGGGLVLPGDSLRLSCATSEFTFTDYYMTWVRQPPRKALEWLGFIRNRANGYTTEYNPSVKGRFTISRDNSQSILYLQMNTLRTEDSATYYCARVSNWAFDYWGQGTTLTVSSGSTSGSGKPGSSEGSTKGDVVMTQTPLSLPVSLGDQASISCRSSQSLLKNNGNTFLHWYLQKSGQSPKLLIYKVSNRLSGVPDRFSGSGSGTYFTLKISRVEAEDLGVYFCSQSTHIPYTFGGGTKLEIK

SEQ ID NO: 6340 - protein, 244 aa, Artificial Sequence
  source: /note="Description of Artificial Sequence: Synthetic single chain variable fragment"
EVQLVQSGAEVEKPGASVKISCKASGSSFTGYNMNWVRQNIGKSLEWIGAIDPYYGGTSYNQKFKGRATLTVDKSTSTAYMHLKSLRSEDTAVYYCVSGMEYWGQGTSVTVSSGSTSGSGKPGSSEGSTKGDVVMTQTPLSLPVTPGEPASISCRSSQSLVHRNGNTYLHWYLQKPGQSPKLLIHKVSNRFSGVPDRFSGSGSGTDFTLKISRVEAEDLGVYFCSQSTHVPPLTFGAGTKLELK

SEQ ID NO: 6341 - protein, 243 aa, Artificial Sequence
  source: /note="Description of Artificial Sequence: Synthetic single chain variable fragment"
QVQLKESGPVLVAPSQTLSITCTVSGFSLASYNIHVWRQPPGKGLEWLGVIWAGGSTNYNSALMSRLSISKDNSKSQVFLQMNSLQTDDTAMYYCAKRSDDYSWFAYWGQGTLVTVSASGGGGSGGGGSGGGGSENVLTQSPAIMSASPGEKVTMTCRASSSVSSSYLHWYQQKSGASPKVWIYSTSNLASGVPGRFSGSGSGTSYSLTISSVEAEDAATYYCQQYSGYPITFGAGTKVEVKR

SEQ ID NO: 6342 - protein, 242 aa, Artificial Sequence
  source: /note="Description of Artificial Sequence: Synthetic single chain variable fragment"
QVQLQESGPGLVKPSQTLSITCTVSGFSLASYNIHWVRQPPGKGLEWLGVIWAGGSTNYNSALMSRLTISKDNSKNQVFLKMSSLTAADTAVYYCAKRSDDYSWFAYWGQGTLVTVSSGGGGSGGGGSGGGGSENQMTQSPSSLSASVGDRVTMTCRASSSVSSSYLHWYQQKSGKAPKVWIYSTSNLASGVPSRFSGSGSGTDYTLTISSLQPEDFATYYCQQYSGYPITFGQGTKVEIKR

SEQ ID NO: 6343 - protein, 261 aa, Artificial Sequence
  source: /note="Description of Artificial Sequence: Synthetic single chain variable fragment"
MDWIWRILFLVGAATGAHSQVQLQQSGAELVRPGASVKLSCKASGYTFTDYEMHWVKQTPVHGLKWIGALDPKTGDTAYSQKFKGKATLTADKSSSTAYMELRSLTSEDSAVYYCTRFYSYTYWGQGTLVTVSAGGGGSGGGGSGGGGSDVVMTQTPLSLPVSLGDQASISCRSSQSLVHSNGNTYLHWYLQKPGQSPKLLIYKVSNRFSGVPDRFSGSGSGTDFTLKISRVEAEDLGVYFCSQNTHVPPTFGSGTKLEIK

SEQ ID NO: 6344 - protein, 239 aa, Artificial Sequence
  source: /note="Description of Artificial Sequence: Synthetic single chain variable fragment"
EVQLLESGGGLVQPGGSLRLSCAASGFTFSSYAMSWVRQAPGKGLEWVSTIQKQGLPTEYADSVKGRFTISRDNSKNTLYLQMNSLRAEDTAVYYCAKNRAKFDYWGQGTLVTVSSGGGGSGGGGSGGGGSTDIQMTQSPSSLSASVGDRVTITCRASQSISSYLNWYQQKPGKAPKLLIYNASMLQSGVPSRFSGSGSGTDFTLTISSLQPEDFATYYCQQNRGFPLTFGQGTKVEIK

SEQ ID NO: 6345 - protein, 242 aa, Artificial Sequence
  source: /note="Description of Artificial Sequence: Synthetic single chain variable fragment"
QVQLQQSGAELVRPGASVKLSCKASGYTFTDYEMHWVKQTPVHGLKWIGALDPKTGDTAYSQKFKGKATLTADKSSSTAYMELRSLTSEDSAVYYCTRFYSYTYWGQGTLVTVSAGGGGSGGGGSGGGGSDVVMTQTPLSLPVSLGDQASISCRSSQSLVHSNGNTYLHWYLQKPGQSPKLLIYKVSNRFSGVPDRFSGSGSGTDFTLKISRVEAEDLGVYFCSQNTHVPPTFGSGTKLEIK

SEQ ID NO: 6346 - protein, 252 aa, Artificial Sequence
  source: /note="Description of Artificial Sequence: Synthetic single chain variable fragment"
QSVLTQPPSVSAAPGQKVTIPCSGSRSNVGNYYVSWYQQLPGTAPKLLIYDNNKRPSGIPDRFSGSKSGTSATLGITGLQTGDEADYFCGTWDGSLSAHVFGTGTKVTVLGSRGGGGSGGGGSGGGGSLEMAQVQLVQSGSELKKPGASVRVSCTASGYTFTSYYMHWVRQAPGQGLEWMGVINPNAGSTRYAQKFQGRVTMSTDTSTSTAYMDLSSLRSEDTAVYYCARGMYRSLLFYDPWGQGTLVTVSS

SEQ ID NO: 6347 - protein, 250 aa, Artificial Sequence
  source: /note="Description of Artificial Sequence: Synthetic single chain variable fragment"
NFMLTQPHSVSESPGKTVSISCTRTSGAIAGAYVQWFQQRPGSAPTTVIYDDNKRPSGVPDRFSGSIDKSSNSASLTISGLKTEDEADYYCQSYDYDSSNVLFGGGTKLTVLGSRGGGGSGGGGSGGGGSLEMAEVQLVESGGGLVQPGGSLRLSCAASGFTFSNYAMSWVRQAPGKGLEWVSAISGSGNTYYADSVKGRFTISRDNSKNTLYLQMNSLRAEDTAVYYCARGSVRYTDIWGQGTLVTVSS

SEQ ID NO: 6348 - protein, 248 aa, Artificial Sequence
  source: /note="Description of Artificial Sequence: Synthetic single chain variable fragment"
DIQLTQSPSSLSASVGDRVTITCRASQSISSYLNWYQQKPGKAPKLLIYAASSLQSGVPSRFSGSGSGTDFTLTISSLQPADFATYYCQQSYSVPYTFGQGTKLEIKRSRGGGGSGGGGSGGGGSLEMAEVQLVQSGGGLVQPGGSLRLSCATSGFTFNNYWMSWVRQAPGKGLEWVANIKQDGSEKYYADSVRGRFTISRDNAKNSLSLQLNNLRAEDTAVYYCARSMSTAWGYDEWGQGTLVTVSS

SEQ ID NO: 6349 - protein, 253 aa, Artificial Sequence
  source: /note="Description of Artificial Sequence: Synthetic single chain variable fragment"
QSALTQPASVSGSPGQSITISCTGTSSDVGGYNFVSWYQQHPGKAPKVMIYDVSKRPSGISNRFSGSKSGNTASLTISGLQVEDEAEYYCSSYTSTRTVIFAGGTKVTVLGSRGGGGSGGGGSGGGGSLEMAQVQLVQSGAEVKKPGASVKVSCKASGYTFTSYYMHWVRQAPGQGLEWMGIINPSGGSTRYAQKFQGRVTMTRDTSTSTVYMELSSLRSEDTAVYYCARGSSRWGGWTGDYWGQGTLVTVSS

SEQ ID NO: 6350 - protein, 249 aa, Artificial Sequence
  source: /note="Description of Artificial Sequence: Synthetic single chain variable fragment"
  MOD_RES (37)..(37): Any amino acid
QSVLTQPPSLSGAPGQRVTISCSGSRSNIGTNYVSWXQQLPGTAPKLLIYRNHQWPSGVPDRFTGSKSGTSASLAISGLRSEDEADYYCAAWDDNLSGVVFGGGTKLTVLGSRGGGGSGGGGSGGGGSLEMAEVQLVETGGGLVQPGGSLRLSCAASGSTFSSYAMSWVRQAPGKGLEWVSAISGRGRSTYYADSVKGRFTISRDNSKNTLYLQMNSLRAEDTAVYYCARYYKSSKDHWGQGTLVTVSS

SEQ ID NO: 6351 - protein, 253 aa, Artificial Sequence
  source: /note="Description of Artificial Sequence: Synthetic single chain variable fragment"
QAVLTQPPSASGTPGQRVTISCSGSSSNIGSNYVYWYQQLPGTAPKLLIYRNNQRPSGVPDRFSGSKSGTSASLAISGLRSEDEADYYCAAWDDSLSGYVFGTGTKVTVLGSRGGGGSGGGGSGGGGSLEMAQVQLVQSGAEVQRPGASVRVSCKAIAYTFTDYYIHWVRQAPGQGPEWMGWINPKSGRTQYAPKFQDRVTLARETPISTASMELRGLTSDDTAVYYCARVYGYSRWSGFDLWGQGTLVTVSS

SEQ ID NO: 6352 - protein, 256 aa, Artificial Sequence
  source: /note="Description of Artificial Sequence: Synthetic single chain variable fragment"
QSALTQPASVSGSPGQSITISCTGTSRDVGGYNYVSWYQQYPGKAPKLMIYEVSKRPSGVSNRFSGSKSGNTASLTISGLQAEDEADYYCSSYTSSSTLDFGTGTKVTVLGSRGGGGSGGGGSGGGGSLEMAQVQLVQSGAEVKQPGASVKVSCQASGYTFTTYYMHWVRQAPGQGLEWMGIINPNGGGTFYAQKFQDRVTMTRDTSTGTVYMELSSLRSDDTAVYYCARGHKVYKSHPTGGYDRWGQGTLVTVSS

SEQ ID NO: 6353 - protein, 251 aa, Artificial Sequence
  source: /note="Description of Artificial Sequence: Synthetic single chain variable fragment"
SYELTQPPSASGTPGQRVTISCSGSSSNIGSNYVSWYQQLPGTAPKLLIYRNNQRPSGVPDRFSGSKSGTSASLAISGLRSEDEADYYCAAWDDSLSGVVFGGGTKLTVLGSRGGGGSGGGGSGGGGSLEMAEVQLVQSGAEVKKPGSSVKVSCKASGGTFSSYAISWVRQAPGQGLEWMGGIIPIFGTAKYAQKFQGRVTITADESTSTAYMELSSLRSEDTAVYYCARSHVAWSLLDYWGQGTLVTVSS

SEQ ID NO: 6354 - protein, 252 aa, Artificial Sequence
  source: /note="Description of Artificial Sequence: Synthetic single chain variable fragment"
QSVLTQPPSASGTPGQRVTISCSGSSSNIGSNYVYWYQQLPGTAPKLLIYRNNQRPSGVPDRFSGSKSGTSASLAISGLRSEDEADYYCAAWDDSLSGWVFGGGTKLTVLGSRGGGGSGGGGSGGGGSLEMAQVQLVQSGAEVKKPGSSVKVSCKASGGTFSSYAISWVRQAPGQGLEWMGWMNPNSGNTGYAQKFQGRVTMTRNTSISTAYMELSSLRSEDTAVYYCARYQSYKGSQSDSWGQGTLVTVSS

SEQ ID NO: 6355 - protein, 259 aa, Artificial Sequence
  source: /note="Description of Artificial Sequence: Synthetic single chain variable fragment"
QSALTQPASVSGSPGQSITISCTGTSSDVGGYNYVSWYQQHPGKAPKLMIYDVSKRPSGVSNRFSGSKSGNTASLTISGLQAEDEADYYCSSYTRSSTEVFGGGTKLTVLGSRGGGGSGGGGSGGGGSLEMAEVQLVQSGAEVKKPGASVKVSCKASGYTFTSYYMHWVRQAPGQGLEWMGIINPSGGSTSYAQKFQGRVTMTRDTSTSTVYMELSSLRSEDTAVYYCARGGSKKWSGEKWRRENFDYWGQGTLVTVSS

SEQ ID NO: 6356 - protein, 244 aa, Artificial Sequence
  source: /note="Description of Artificial Sequence: Synthetic single chain variable fragment"
SYVLTQPPSASGTPGQRVTISCSGSSSNIGSNTVNWYQQLPGTAPKLLIYRNNQRPSGVPDRFSGSKSGTSASLAISGLRSEDEADYYCAAWDDSLSGLFGTGTKVTVLGSRGGGGSGGGGSGGGGSLEMAQMQLVQSGAEVKKPGASVKVSCKASEYTFTRHILHWVRQAPGQSLEWMGWINPGNGNTKYSQKFQVRVTFTRDTSASTVYMELSSLRSEDTAVYYCARLPDQWGQGTLVTVSS

SEQ ID NO: 6357 - protein, 247 aa, Artificial Sequence
  source: /note="Description of Artificial Sequence: Synthetic single chain variable fragment"
QSALTQPPSASGSPGQSVTISCTGTSRDAGGYNYFSWYQQHPGKAPKLLIYEVTKRPSGVPDRFSGSKSGKTASLTVSGLQADDEAVYYCSSYGGSNNFRVFGGGTKLTVLGSRGGGGSGGGGSGGGGSLEMAEVQLVESGGGVVRPGGSLRLSCAASGFTFGDYGMSWVRQAPGKGLEWVSGINWNGGSTGYADSVKGRFTISRDNAKNSLYLQMNSLRAEDTAVYYCARSKQDYWGQGTLVTVSS

SEQ ID NO: 6358 - protein, 248 aa, Artificial Sequence
  source: /note="Description of Artificial Sequence: Synthetic single chain variable fragment"
QSVVTQPPSVSGAPGQRVTISCTGSSSNIGAGYDVHWYQQLPGTAPKLLIYGNSNRPSGVPDRFSGSKSGTSASLAITGLQAEDEADYYCQSYDSSLSGSYVFGTGTKLTVLGSRGGGGSGGGGSGGGGSLEMAEVQLVETGGNLVQPGASLRLSCAASGFSFSGTAMHWVRQAPGKGLEWVSTISSTGRSTYYRDSVKGRFTISRDNSKNTLYLQMNSLRGEDTAVYYCARVSFDYWGQGTLVTVSS

SEQ ID NO: 6359 - protein, 250 aa, Artificial Sequence
  source: /note="Description of Artificial Sequence: Synthetic single chain variable fragment"
QSVVTQPASVSGSPGQSITISCTGTSSDVGGYNYVSWYQQHPGKAPKLMIYDVSKRPSGVSNRFSGSKSGNTASLTISGLQAEDEADYYCSSYTSSSTLVFGGGTKLTVLGSRGGGGSGGGGSGGGGSLEMAEVQLVESGGAFVQPGGSLRLSCAASGFTFSSYAMTWVRQAPGKGLEWVSTISGRGRSTFYADSVKGRFTISRDNSKNTLYLQMNSLRAEDTAVYYCARYYHAGAFDLWGQGTLVTVSS

SEQ ID NO: 6360 - protein, 246 aa, Artificial Sequence
  source: /note="Description of Artificial Sequence: Synthetic single chain variable fragment"
QSVLTQPASVSGSPGQSLTISCTGTSNDVGAYKYVSWYQQYPGKAPKLILYDVFKRPSGVSNRFSGSKSDNTASLTISGLQAEDEADYYCFSLTSSNTYVFGTGTKVTVLGSRGGGGSGGGGSGGGGSLEMAQMQLVQSGAEVKKPGASVKVSCKASGYTFNRYAITWVRQAPGQGLEWMGWISAYNGNSHYAQKLQGRVTMTTDTSTGTAYMELRRLRSDDTAVYYCARMAYDSWGQGTLVTVSS

SEQ ID NO: 6361 - protein, 249 aa, Artificial Sequence
  source: /note="Description of Artificial Sequence: Synthetic single chain variable fragment"
QSVLTQPPSASGTPGQRVTISCSGSRSNVGGNYVFWYQQVPGATPKLLIYRSNQRPSGVPDRFAGSKSGSSASLAISGLRSEDEADYYCATWDDSLSGFVFGTGTKVTVLGSRGGGGSGGGGSGGGGSLEMAEVQLVESGGGLVKPGGSLRLSCAASGFTFSDYYMSWIRQAPGKGLEWVSYISSSGSTIYYADSVKGRFTISRDNAKNSLYLQMNSLRAEDTAVYYCARGYGKAYDQWGQGTLVTVSS

SEQ ID NO: 6362 - protein, 250 aa, Artificial Sequence
  source: /note="Description of Artificial Sequence: Synthetic single chain variable fragment"
SSELTQDPAVSVALGQTVRITCQGDSLRSYYASWYQQKPGQAPVLVIYGKNNRPSGIPDRFSGSSSGNTASLTITGAQAEDEADYYCNSRDSSGNPPVVFGGGTKLTVLGSRGGGGSGGGGSGGGGSLEMAQVQLVESGGGLVHPGGSLRLSCAASGFTFRSHSMNWVRQAPGKGLEWVSSISSDSTYTYYADSVKGRFTISRDNAKNSLYLQMNSLRAEDTAVYYCARSGGQWKYYDYWGQGTLVTVSS

SEQ ID NO: 6363 - protein, 248 aa, Artificial Sequence
  source: /note="Description of Artificial Sequence: Synthetic single chain variable fragment"
QSVVTQPPSMSAAPGQQVTISCSGGNSNIERNYVSWYLQLPGTAPKLVIFDNDRRPSGIPDRFSGSKSGTSATLGITGLQTGDEADYYCGTWDSSLRGWVFGGGTKLTVLGSRGGGGSGGGGSGGGGSLEMAEVQLVESGGGLIQPGGSLRLSCAASGFTFSNYAMNWVRQAPGKGLEWVSTINGRGSSTIYADSVKGRFTISRDNSKNTLYLQMNSLRAEDTATYYCARYISRGLGDSWGQGTLVTV

SEQ ID NO: 6364 - protein, 248 aa, Artificial Sequence
  source: /note="Description of Artificial Sequence: Synthetic single chain variable fragment"
QSALTQPPSASGSPGQSVTISCTGTSSDVGGYNYVSWYQQHPGKAPKLMIYEVSKRPSGVPDRFSGSKSGNTASLTVSGLQAEDEADYYCSSYAGSNTLVFGGGTKLTVLGSRGGGGSGGGGSGGGGSLEMAQMQLVQSGAEVKKPGASVKVSCKASGYTFTSYYMHWVRQAPGQGLEWMGIINPSGGSTSYAQKFQGRVTMTRDTSTSTVYMELSSLRSEDTAVYYCARAGMGMDTWGQGTLVTVSS

SEQ ID NO: 6365 - protein, 249 aa, Artificial Sequence
  source: /note="Description of Artificial Sequence: Synthetic single chain variable fragment"
QSALTQPPSASGSPGQSVTISCTGTSSDIGGYNYVSWYQQHPGKAPKLMIYEVNKRPSGVPDRFSGSKSGNTASLTVSGLQAEDEADYYCASFAGRKTLVFGGGTKLTVLGSRGGGGSGGGGSGGGGSLEMAQVQLVQSGAEVKKPGASVKVSCRASGYTFTAYSLHWVRQAPGQGLEWMGWINPSSGGAVYAQKFQGRVTMTRDTSISTAYMELSGLRSDDTAVYYCARNVGGQADDWGQGTLVTVSS

SEQ ID NO: 6366 - protein, 249 aa, Artificial Sequence
  source: /note="Description of Artificial Sequence: Synthetic single chain variable fragment"
QSALTQPPSASGSPGQSVTISCTGTSTDIGGYNYVSWYQHHPSKAPKLMIYEVNKRPSGVPDRFSGSKSGNTASLTVSGLQAEDEADYYCASFAGRKTLVFGGGTKLTVLGSRGGGGSGGGGSGGGGSLEMAQVQLVQSGAEVKKPGASVKVSCRASGYTFTAYSLHWVRQAPGQGLEWMGWINPSSGGAVYAQKFQGRVTMTRDTSISTAYMELSGLRSDDTAVYYCARNVGGHADDWGQGTLVTVSS

SEQ ID NO: 6367 - protein, 261 aa, Artificial Sequence
  source: /note="Description of Artificial Sequence: Synthetic single chain variable fragment"
QSVVTQPPSVSAAPGQKVTISCSGSSSNIGNNYVSWYQQLPGTAPKLLIYDNNKRPSGIPDRFSGSKSGTSATLGITGLQTGDEADYYCGTWDSSLSGVVFGGGTKLTVLGSRGGGGSGGGGSGGGGSLEMAQVQLVQSGGEVKKPGASVKVSCKASGFTFNTYGISWVRQAPGQGLEWMGWISANNGHTKSAQRFQDRVAMATDTSTSTAYMELRSLKFDDTAVYYCARGGYHHQMQRYYKATSVYSDYWGQGTLVTVSS

SEQ ID NO: 6368 - protein, 248 aa, Artificial Sequence
  source: /note="Description of Artificial Sequence: Synthetic single chain variable fragment"
QSALTQPPSASGSPGQSVTISCTGTSSDVGGYNYVSWYQQHPGKAPKLMIYEVSKRPSGVPDRFSGSKSGNTASLTVSGLQAEDEADYYCSSYAGSNTLVFGGGTKLTVLGSRGGGGSGGGGSGGGGSLEMAQMQLVQSGAEVKKPGASVKVSCKASGYTFTSYYMHWVRQAPGQGLEWMGIINPSGGSSSYAQKFQGRVTMTRDTSTSTVYMELSSLRSEDTAVYYCARAGMGMDTWGQGTLVTVSS

SEQ ID NO: 6369 - protein, 249 aa, Artificial Sequence
  source: /note="Description of Artificial Sequence: Synthetic single chain variable fragment"
QSALTQPASVSGSPGQSITISCTGTSSDVGGYNYVSWYQQSPGKAPRLMIYGVSKRPSGVPDRFSGSKSGNTASLTVSGLQAEDEADYYCSSYAGVNNLMFGGGTKLTVLGSRGGGGSGGGGSGGGGSLEMAQVQLVQSGAEVKKPGASVKVSCKASGYTFTSYYMHWVRQAPGQGLEWMGIINPSGGSTSYAQKFQGRVTMTRDTSTSTVYMELSSLRSEDTAVYYCARDVISGFDSWGQGTLVTVSS

SEQ ID NO: 6370 - protein, 271 aa, Artificial Sequence
  source: /note="Description of Artificial Sequence: Synthetic single chain variable fragment"
MKKTAIAIAVALAGFATVAQAAELQSALTQPPSASGSPGQSVTISCTGTSRDAGGYNYFSWYQQHPGKAPKLLIYEVTKRPSGVPDRFSGSKSGKTASLTVSGLQADDEAVYYCSSYGGSNNFRVFGGGTKLTVLGSRGGGGSGGGGSGGGGSLEMAEVQLVESGGGVVRPGGSLRLSCAASGFTFGDYGMSWVRQAPGKGLEWVSGINWNGGSTGYADSVKGRFTISRDNAKNSLYLQMNSLRAEDTAVYYCARSKQDYWGQGTLVTVSS

SEQ ID NO: 6371 - protein, 277 aa, Artificial Sequence
  source: /note="Description of Artificial Sequence: Synthetic single chain variable fragment"
MKKTAIAIAVALAGFATVAQAAELSYELTQPPSASGTPGQRVSISCSGSSSNIGSNTVNWYQQFPGTAPKLLIHSNNQRPSGVPDRFSGSKSGTSASLAISGPQSEDEADYYCAAWDDSVNGYVFGTGTKVTVLGSRGGGGSGGGGSGGGGSLEMAQLQLQESGGGSVQPGGSLRLSCAASGFTFSNYAMSWVRQAPGKGLEWVSAITNSGRSTYYADSVKGRFTISRDNSKNTLSLQMSSLRAEDTAVYYCARVTHRRYGSTFDSRGQGTLVTVSS

SEQ ID NO: 6372 - protein, 276 aa, Artificial Sequence
  source: /note="Description of Artificial Sequence: Synthetic single chain variable fragment"
MKKTAIAIAVALAGFATVAQAAELQPVLTQPPSASGTPGQRVTISCSGSSSNIGGNTVSWYQQVPGTAPRLLIFRNNQRPPGVPDRFSGSKSGTSASLAISGLRSEDEADYYCAAWDASRQGVFGGGTKLTVLGSRGGGGSGGGGSGGGGSLEMAQVQLVQSGAEVKKPGSSVKVSCKASGGTFRSYAITWVRQAPGQGLEWMGRIIPMLDITNYAQKFQGRVTITADKSTSTAYMELSSLRSEDTAVYYCARTYSRSPFHMEDFWGQGTLVTVSS

SEQ ID NO: 6373 - protein, 270 aa, Artificial Sequence
  source: /note="Description of Artificial Sequence: Synthetic single chain variable fragment"
MKKTAIAIAVALAGFATVAQAAELQSVLTQPPSASGTPGQRVTISCSGSSSNIGSNTVNWYQQLPGTAPKLLIYRNNQRPSGVPDRFSGSKSGTSASLAISGLRSEDEADYYCAAWDDSLSGRVFGGGTKLTVLGSRGGGGSGGGGSGGGGSLEMAEVQLVESGGGLVQPGGSLRLSCAASGFTFSSYAMSWVRQAPGKGLEWVSAISGSGGSTYYADSVKGRFTISRDNAKNTLYLQMNSLRAEDTAVYYCARKYQDVWGQGTLVTVSS

SEQ ID NO: 6374 - protein, 279 aa, Artificial Sequence
  source: /note="Description of Artificial Sequence: Synthetic single chain variable fragment"
MKKTAIAIAVALAGFATVAQAAELQSVLTQPPSVSGAPGQRVTISCTGSSSNIGAGYDVHWYQQLPGRAPKLLIYGNSNRPSGVPDRFSGSKSGTSASLAITGLQAEDEADYYCQSYDSSLRGYVFGTGTKVTVLGSRGGGGSGGGGSGGGGSLEMAQVQLVQSGGGVVQPGRSLRLSCAASGFSFSGTAMHWVRQAPGKGLEWVSTISSTGRSTYYRDSVKGRFTISRDNSKNTLYLQMNSLRGEDTAVYYCARPVSSMTLSIQSDGWGQGTLVTVSS

SEQ ID NO: 6375 - protein, 286 aa, Artificial Sequence
  source: /note="Description of Artificial Sequence: Synthetic single chain variable fragment"
MKKTAIAIAVALAGFATVAQAAELQSVVTQPPSVSAAPGQRVTISCSGGSSNIGNNYVSWFQQLPRTAPKLLIYDNNKRPSGIPDRFSGSKSGTSAALDITVLQTGDEADYYCGTWDSSLRNWVFGGGTKLTVLGSRGGGGSGGGGSGGGGSLEMAQMQLVQSGAEVKKPGASVKVSCKASGYTFTSYYMHWVRQAPGQGLEWMGIINPSGGSTSYAQKFQGRVTMTRDTSTSTVYMELSSLRSEDTAVYYCARGQKYHSQYSRGGTGGGMTQDMWGQGTLVTVSS

SEQ ID NO: 6376 - protein, 273 aa, Artificial Sequence
  source: /note="Description of Artificial Sequence: Synthetic single chain variable fragment"
MKKTAIAIAVALAGFATVAQAAELQSVLTQPPSASGSPGQSLTISCTGTSSDVGGYNHVSWYQQYPGKAPKLMIYEVTKRPSGVPDRFSGSKSGNTASLTVSGLQAEDEADYYCSSYAGSAHWVFGGGTKLTVLGSRGGGGSGGGGSGGGGSLEMAEVQLVQSGAEVKKPGASVKVSCKASGYTFSRYYIHWVRQAPGQGLEWMGWMNPNSGNTGYAQKFQGRVTMTRNTSISTAYMELSSLRSEDTAVYYCARGRYHVIDYWGQGTLVTVSS

SEQ ID NO: 6377 - protein, 269 aa, Artificial Sequence
  source: /note="Description of Artificial Sequence: Synthetic single chain variable fragment"
MKKTAIAIAVALAGFATVAQAAELQAVLTQPPSASGTPGQRVTISCSGSSSNIGSNYVYWYQQLPGTAPKLLIYRNNQRPSGVPDRFSGSKSGTSASLAISGLRSEDEADYYCAAWDDSLSGRVFGTGTKVTVLGSRGGGGSGGGGSGGGGSLEMAQLQLVQSGAEVKKPGSSVKVSCKASGYTFNTYYLHWVRQAPGQGLEWMGRINPNNGGTNYAQKFQGRVTMTRDTSINTAYMELSRLRSDDTAVYYCARSYDYWGQGTLVTVSS

SEQ ID NO: 6378 - protein, 643 aa, Artificial Sequence
  source: /note="Description of Artificial Sequence: Synthetic single chain variable fragment"
EVQLLEQSGAELVRPGALVKLSCKASGFKIKDYFVNWVKQRPEQGLEWIGWIDPENDNSLYGPNFQDKASITADTSSNTGYLQLSGLTSEDTAVYYCALYYGSRGDAMDYWGQGTTVTVSSGGGGSGGGGSGGGGSELVMTQTPSSLSASLGDRVTISCRASQDISNYLNWYQQKPDGTVKLLIYYTSRLHSGVPSRFSGSGSGTDYSLTISNLEQEDIATYFCQQGNTLPLTFGAGTKLEIKSGGGGSEVQLVESGGGLVQPGGSLKLSCAASGFTFNSYAMNWVRQAPGKGLEWVARIRSKYNNYATYYADSVKGRFTISRDDSKNTAYLQMNNLKTEDTAVYYCVRHGNFGNSYVSWWAYWGQGTLVTVSSGGGGSGGGGSGGGGSQTVVTQEPSLTVSPGGTVTLTCGSSTGAVTSGNYPNWVQQKPGQAPRGLIGGTKFLAPGTPARFSGSLLGGKAALTLSGVQPEDEAEYYCVLWYSNRWVFGGGTKLTVLAAADYKDDDDKGSSHHHHHHEVQLVESGGGLVQPGGSLKLSCAASGFTFNKYAMNWVRQAPGKGLEWVARIRSKYNNYATYYADSVKDRFTISRDDSKNTAYLQMNNLKTEDTAVYYCVRHGNFGNSYISYWAYWGQGTLVTVSS

SEQ ID NO: 6379 - protein, 252 aa, Artificial Sequence; identical to SEQ ID NO: 5991
  source: /note="Description of Artificial Sequence: Synthetic single chain variable fragment"

SEQ ID NO: 6380 - protein, 260 aa, Artificial Sequence
  source: /note="Description of Artificial Sequence: Synthetic single chain variable fragment"
DVQITQSPSYLAASPGETITINCRASKSISKYLAWYQEKPGKTNKLLIYSGSTLQSGIPSRFSGSGSGTDFTLTISSLEPEDFAMYYCQQHNEYPYTFGGGTKLEIKRGSTSGSGKPGSGEGSTKGEVMLVESGGGLVKPGGSLKLSCAASGFTFSSYAMSWVRQTPEKRLEWVATITSGGDYTFYPDSVKGRFTISRDNAKNTLYLQMSSRRSEDTAMYYCARHGEIGYGSSAWFAYWGQGTLVTVSAGGGGSGGGGSC

SEQ ID NO: 6381 - protein, 244 aa, Artificial Sequence
  source: /note="Description of Artificial Sequence: Synthetic single chain variable fragment"
QVQLVQSGAEVKKPGASVKVSCKASGYTFSNYGITWVRQAPGQGLEWMGWINNGNTHYAQKFQGRVTMTTDTSTSTAYMELRSLRSDDTAVYYCARDPRGDDEPYWGQGTLVTVSSGGGGSGGGGSGGGGSEIVLTQSPLSLPVTLGQPASISCRSSQNLVYSDGNTYLSWFQQRPGQSPRRLIYKVSNRDSGVPDRFSGSGSGTDFTLKISRVEAEDIGVYYCMQGTHWPPRTFGQGTKVEIK

SEQ ID NO: 6382 - protein, 232 aa, Artificial Sequence
  source: /note="Description of Artificial Sequence: Synthetic single chain variable fragment"
QVQLVQSGAEVKEPGSSVKVSCKASGGTFSSYAIYWVRQAPGQGLEWMGWINPDSGDTNSAQQFQGRVTMTRDTSISTAYMELSRLRSDDTAMYYCARPPRGDGPDYWGQGTLVTVSSGGGGGSEIVLTQSPGTLSLSPGERATLSCRASQSVSSSYLAWYQQKPGQAPRLLIYGASSRATGIPDRFSGSGSGTDFTLTISRLEPEDFAVYYCQQYGSSPRTFGQGTKVDIK

SEQ ID NO: 6383 - protein, 255 aa, Artificial Sequence
  source: /note="Description of Artificial Sequence: Synthetic single chain variable fragment"
EIVLTQSPGTLSLSPGERATLSCRASQSVGSSYLAWYQQKPGQAPRLLIYGAFSRATGIPDRFSGSGSGTDFTLTISRLEPEDFAVYYCQQYGSSPWTFGQGTKVEIKGSTSGSGKPGSGEGSTKGQVQLVESGGGVVQPGRSLRLSCAASGFTFSSYTMHWVRQAPGKGLEWVTFISYDGNNKYYADSVKGRFTISRDNSKNTLYLQMNSLRAEDTAIYYCARTGWLGPFDYWGQGTLVTVSSGGGGSGGGGSC

SEQ ID NO: 6384 - protein, 255 aa, Artificial Sequence; identical to SEQ ID NO: 6383
  source: /note="Description of Artificial Sequence: Synthetic single chain variable fragment"

SEQ ID NO: 6385 - protein, 511 aa, Artificial Sequence
  source: /note="Description of Artificial Sequence: Synthetic single chain variable fragment"
METDTLLLWVLLLWVPAGNGEVQLVESGGGLVQPGGSLRLSCSFSGFSLSTSGMGVSWVRQAPGKGLEWLAHIYWDDDKRYNPSLKSRFTISRDNSKNTVYLQMNSLRAEDTAVYYCARRETVFYWYFDVWGQGTTVTVSSGGGGSGGGGSGGGTGDIVMTQSPDSLAVSLGDRATINCKASQSVDYDGDSYMNWYQQKPGQPPKLLIYAASNLESGVPDRFSGSGSGTDFTLTISSLQAEDVAVYYCQQSNEDPPTFGGGTKVEISSSSGSDKTHTCPPCPAPELLGGPSVFLFPPKPKDTLMISRTPEVTCWVDVSHEDPEVKFNWYVDGVEVHNAKTKPREEQYNSTYRWSVLTVLHQDWLNGKEYKCKVSNKALPAPIEKTISKAKGQPREPQVYTLPPSREEMTKNQVSLTCLVKGFYPSDIAVEWESNGQPENNYKTTPPVLDSDGSFFLYSKLTVDKSRWQQGNVFSCSVMHEALHNHYTQKSLSLSPGSSSSSSAWSHPQFEK

SEQ ID NO: 6386 - protein, 506 aa, Artificial Sequence
  source: /note="Description of Artificial Sequence: Synthetic single chain variable fragment"
METDTLLLWVLLLWVPAGNGEVQLVESGGGLVKPGGSLRLSCAASGFTFNTNAMNWVRQAPGKGLEWVARIRSKSNNYATYYADSVKDRFTLSRDDSKNTLYLQMNSLKTEDTAVYYCTRDRGWGAMDYWGQGTTVTVSSGGGGSGGGGSGGGTGDIQMTQSPSSLSASVGDRVTITCSASQDINNYLNWYQQKPGKAPKLLIYYTSSLHSGVPSRFSGSGSGTDFTLTLSSLQPEDFATYYCQQFSNLPWTFGGGTKLEISSSSGSDKTHTCPPCPAPELLGGPSVFLFPPKPKDTLMISRTPEVTCWVDVSHEDPEVKFNWYVDGVEVHNAKTKPREEQYNSTYRWSVLTVLHQDWLNGKEYKCKVSNKALPAPIEKTISKAKGQPREPQVYTLPPSREEMTKNQVSLTCLVKGFYPSDIAVEWESNGQPENNYKTTPPVLDSDGSFFLYSKLTVDKSRWQQGNVFSCSVMHEALHNHYTQKSLSLSPGSSSSSSAWSHPQFEK

SEQ ID NO: 6387 - protein, 508 aa, Artificial Sequence
  source: /note="Description of Artificial Sequence: Synthetic single chain variable fragment"
VLTQTPSPVSAAVGGTVTINCQSSPSLIYDSRLAWYQQKPGQPPKLLIYKASTLASGVPSRFSGSGSGTQFTLTISDVQSDDAATYYCQSHDTNPGSSTYGAPFGGGTEVVVQGGGGSGGGGSSGGGSEVQLMESGGGLVKPEGSLTLTCKVSGFSFSTSAISWVRQAPGKRPEWIAGIYNGGGSTYYASWVNGRFSISRSTSLNTVTLQMTRLTAADTATYFCARWIRIHYSFDLWGPGTLVTVSSSGGGGSEVQLVESGGGLVQPGGSLKLSCAASGFTFNKYAMNWVRQAPGKGLEWVARIRSKYNNYATYYADSVKDRFTISRDDSKNTAYLQMNNLKTEDTAVYYCVRHGNFGNSYISYWAYWGQGTLVTVSSGGGGSGGGGSGGGGSQTVVTQEPSLTVSPGGTVTLTCGSSTGAVTSGNYPNWVQQKPGQAPRGLIGGTKFLAPGTPARFSGSLLGGKAALTLSGVQPEDEAEYYCVLWYSNRWVFGGGTKLTVLHHHHHH

SEQ ID NO: 6388 - protein, 262 aa, Artificial Sequence
  source: /note="Description of Artificial Sequence: Synthetic single chain variable fragment"
QVQLQESGPGLVKPSETLSLTCTVSGGSVSSGSYYWSWIRQPPGKGLEWIGYIYYSGSTNYNPSHKSRVTISVDTSKNQFSLKLSSVTAADTAVYYCAREGKNGAFDIWGQGTMVTVSSSGGGGSGGGGSGGGGERHQMTQSPSSLSASVGDRVTITCRASQSISSYLNWYQQKPGKAPKLLIYAASSLQSGVPSRFSGSGSGTDFTLTISSLQPEDFATYYCQQSYSTPLTFGGGTKVEIKGQAGHHHHHHGDYKDDDDKG

SEQ ID NO: 6389 - protein, 243 aa, Artificial Sequence
  source: /note="Description of Artificial Sequence: Synthetic single chain variable fragment"
QVQLQQSGAEVKKPGASVKVSCKASGYTFTGYYMHWVRQAPGQGLEWMGINPNSGGTNYAQKFQGRVTMTRDTSISTAYMELSRLRSEDTAVYYCARGRYYGMDVWGQGTMVTVSSGGGGSGGGGSGGGGSGGGGSEIVLTQSPATLSLSPGERATISCRASQSVSSNFAWYQQRPGQAPRLLIYDASNRATGIPPRFSGSGSGTDFTLTISSLEPEDFAAYYCHQRSNWLYTFGQGTKVDIK

SEQ ID NO: 6390 - protein, 239 aa, Artificial Sequence
  source: /note="Description of Artificial Sequence: Synthetic single chain variable fragment"
QVQLQQSGPELEKPGASVKISCKASGYSFTGYTMNWVKQSHGKSLEWIGLITPYNGASSYNQKFRGKATLTVDKSSSTAYMDLLSLTSEDSAVYFCARGGYDGRGFDYWGQGTTVTVSSGGGGSGGGGSGGGGSDIELTQSPAIMSASPGEKVTMTCSASSSVSYMHWYQQKSGTSPKRWIYDTSKLASGVPGRFSGSGSGNSYSLTISSVEAEDDATYYCQQWSGYPLTFGAGTKLEI

SEQ ID NO: 6391 - protein, 240 aa, Artificial Sequence
  source: /note="Description of Artificial Sequence: Synthetic single chain variable fragment"
QVQLQQSGAEVKKPGASVKVSCKASGYTFTGYYMHWVRQAPGQGLEWMGINPNSGGTNYAQNFQGRVTMTRDTSISTAYMELRRLRSDDTAVYYCASGWDFDYWGQGTLVTVSSGGGGSGGGGSGGGGSGGGGSDIRMTQSPSSLSASVGDRVTITCRASQSIRYYLSWYQQKPGKAPKLLIYTASILQNGVPSRFSGSGSGTDFTLTISSLQPEDFATYYCLQTYTTPDFGPGTKVEIK

SEQ ID NO: 6392 - protein, 252 aa, Artificial Sequence
  source: /note="Description of Artificial Sequence: Synthetic single chain variable fragment"
QVQLVQSGAEVKKPGASVKVSCKASGYTFTGYYMHWVRQAPGQGLEWMGINPNSGGTNYAQKFQGRVTMTRDTSISTAYMELSRLRSDDTAVYYCARDLRRTVVTPRAYYGMDVWGQGTTVTVSSGGGGSGGGGSGGGGSGGGGSDIQLTQSPSTLSASVGDRVTITCQASQDISNSLNWYQQKAGKAPKLLIYDASTLETGVPSRFSGSGSGTDFSFTISSLQPEDIATYYCQQHDNLPLTFGQGTKVEIK

SEQ ID NO: 6393 - protein, 245 aa, Artificial Sequence
  source: /note="Description of Artificial Sequence: Synthetic single chain variable fragment"
QVQLVQSGAEVKKPGAPVKVSCKASGYTFTGYYMHWVRQAPGQGLEWMGINPNSGGTNYAQKFQGRVTMTRDTSISTAYMELSRLRSDDTAVYYCARGEWDGSYYYDYWGQGTLVTVSSGGGGSGGGGSGGGGSGGGGSDIVLTQTPSSLSASVGDRVTITCRASQSINTYLNWYQHKPGKAPKLLIYAASSLQSGVPSRFSGSGSGTDFTLTISSLQPEDFATYYCQQSFSPLTFGGGTKLEIK

SEQ ID NO: 6394 - protein, 241 aa, Artificial Sequence
  source: /note="Description of Artificial Sequence: Synthetic single chain variable fragment"
QVQLVESGGGLVQPGGSLRLSCAASGFTFSSYWMHWVRQVPGKGLVWVSINTDGSTTTYADSVEGRFTISRDNAKNTLYLQMNSLRDDDTAVYYCVGGHWAVWGQGTTVTVSSGGGGSGGGGSGGGGSGGGGSDIQMTQSPSTLSASVGDRVTITCRASQSISDRLAWYQQKPGKAPKLLIYKASSLESGVPSRFSGSGSGTEFTLTISSLQPDDFAVYYCQQYGHLPMYTFGQGTKVEIK

SEQ ID NO: 6395 - protein, 240 aa, Artificial Sequence
  source: /note="Description of Artificial Sequence: Synthetic single chain variable fragment"
QVQLVQSGAEVEKPGASVKVSCKASGYTFTDYYMHWVRQAPGQGLEWMGINPNSGGTNYAQKFQGRVTMTRDTSISTAYMELSRLRSDDTAVYYCASGWDFDYWGQGTLVTVSSGGGGSGGGGSGGGGSGGGGSDIVMTQSPSSLSASVGDRVTITCRASQSIRYYLSWYQQKPGKAPKLLIYTASILQNGVPSRFSGSGSGTDFTLTISSLQPEDFATYYCLQTYTTPDFGPGTKVEIK

SEQ ID NO: 6396 - protein, 249 aa, Artificial Sequence
  source: /note="Description of Artificial Sequence: Synthetic single chain variable fragment"
QVQLVQSGGGVVQPGRSLRLSCAASGFTFSSYAMHWVRQAPGKGLEWVAISYDGSNKYYADSVKGRFTISRDNSKNTLYLQMNSLRAEDTAVYYCARWKVSSSSPAFDYWGQGTLVTVSSGGGGSGGGGSGGGGSGGGGSEIVLTQSPATLSLSPGERAILSCRASQSVYTKYLGWYQQKPGQAPRLLIYDASTRATGIPDRFSGSGSGTDFTLTINRLEPEDFAVYYCQHYGGSPLITFGQGTRLEIK

SEQ ID NO: 6397 - protein, 245 aa, Artificial Sequence
  source: /note="Description of Artificial Sequence: Synthetic single chain variable fragment"
QVQLQQSGAEVKKPGASVKVSCKTSGYPFTGYSLHWVRQAPGQGLEWMGINPNSGGTNYAQKFQGRVTMTRDTSISTAYMELSRLRSDDTAVYYCARDHYGGNSLFYWGQGTLVTVSSGGGGSGGGGSGGGGSGGGGSDIQLTQSPSSISASVGDTVSITCRASQDSGTWLAWYQQKPGKAPNLLMYDASTLEDGVPSRFSGSASGTEFTLTVNRLQPEDSATYYCQQYNSYPLTFGGGTKVDIK

SEQ ID NO: 6398 - protein, 248 aa, Artificial Sequence
  source: /note="Description of Artificial Sequence: Synthetic single chain variable fragment"
QVQLVQSGAEVKKPGASVEVSCKASGYTFTSYYMHWVRQAPGQGLEWMGLINPSGGSTGYAQKFQGRVTMTRDTSTSTVHMELSSLRSEDTAVYYCARGGYSSSSDAFDIWGQGTMVTVSSGGGGSGGGGSGGGGSGGGGSDIQMTQSPPSLSASVGDRVTITCRASQDISSALAWYQQKPGTPPKLLIYDASSLESGVPSRFSGSGSGTDFTLTISSLQPEDFATYYCQQFSSYPLTFGGGTRLEIK

SEQ ID NO: 6399 - protein, 254 aa, Artificial Sequence
  source: /note="Description of Artificial Sequence: Synthetic single chain variable fragment"
QVQLVQSGAEVKKPGASVKVSCKASGYTFTSYGISWVRQAPGQGLEWMGISAYNGNTNYAQKLQGRVTMTTDTSTSTAYMELRSLRSDDTAVYYCARVAGGIYYYYGMDVWGQGTTITVSSGGGGSGGGGSGGGGSGGGGSDIVMTQTPDSLAVSLGERATISCKSSHSVLYNRNNKNYLAWYQQKPGQPPKLLFYWASTRKSGVPDRFSGSGSGTDFTLTISSLQPEDFATYFCQQTQTFPLTFGQGTRLEIN

SEQ ID NO: 6400 - protein, 245 aa, Artificial Sequence
  source: /note="Description of Artificial Sequence: Synthetic single chain variable fragment"
QVQLVQSGAEVKKPGASVKVSCKASGYTFTGYYMHWVRQAPGQGLEWMGINPNSGGTNYAQKFQGRVTMTTDTSTSTAYMELRSLRSDDTAVYYCARTTTSYAFDIWGQGTMVTVSSGGGGSGGGGSGGGGSGGGGSDIQLTQSPSTLSASVGDRVTITCRASQSISTWLAWYQQKPGKAPNLLIYKASTLESGVPSRFSGSGSGTEFTLTISSLQPDDFATYYCQQYNTYSPYTFGQGTKLEIK

SEQ ID NO: 6401 - protein, 249 aa, Artificial Sequence
  source: /note="Description of Artificial Sequence: Synthetic single chain variable fragment"
QVQLVQSGGGLVKPGGSLRLSCEASGFIFSDYYMGWIRQAPGKGLEWVSIIGRSGSSMYYADSVKGRFTFSRDNAKNSLYLQMNSLRAEDTAVYYCAASPVVAATEDFQHWGQGTLVTVSSGGGGSGGGGSGGGGSGGGGSDIVMTQTPATLSLSPGERATLSCRASQSVTSNYLAWYQQKPGQAPRLLLFGASTRATGIPDRFSGSGSGTDFTLTINRLEPEDFAMYYCQQYGSAPVTFGQGTKLEIK

SEQ ID NO: 6402 - protein, 245 aa, Artificial Sequence
  source: /note="Description of Artificial Sequence: Synthetic single chain variable fragment"
EVQLVESGGGLVQPGRSLRLSCAASGFTFDDYAMHWVRQAPGKGLEWVSISWNSGSTGYADSVKGRFTISRDNAKNSLYLQMNSLRAEDTALYYCAKDSSSWYGGGSAFDIWGQGTMVTVSSGGGGSGGGGSGGGGSSSELTQEPAVSVALGQTVRITCQGDSLRSYYASWYQQKPGQAPVLVIFGRSRRPSGIPDRFSGSSSGNTASLIITGAQAEDEADYYCNSRDNTANHYVFGTGTKLTVL

SEQ ID NO: 6403 - protein, 250 aa, Artificial Sequence
  source: /note="Description of Artificial Sequence: Synthetic single chain variable fragment"
QVQLVQSGGGLVQPGGSLRLSCAASGFTFSSYWMHWVRQAPGKGLVWVSINSDGSSTSYADSVKGRFTISRDNAKNTLYLQMNSLRAEDTAVYYCVRTGWVGSYYYYMDVWGKGTTVTVSSGGGGSGGGGSGGGGSGGGGSEIVLTQSPGTLSLSPGERATLSCRASQSVSSNYLAWYQQKPGQPPRLLIYDVSTRATGIPARFSGGGSGTDFTLTISSLEPEDFAVYYCQQRSNWPPWTFGQGTKVEIK

SEQ ID NO: 6404 - protein, 249 aa, Artificial Sequence
  source: /note="Description of Artificial Sequence: Synthetic single chain variable fragment"
QVQLVQSGGGVVQPGRSLRLSCAASGFTFSSYGMHWVRQAPGKGLEWVAISYDGSNKYYADSVKGRFTISRDNSKNTLYLQMNSLRAEDTAVYYCAKGYSRYYYYGMDVWGQGTTVTVSSGGGGSGGGGSGGGGSGGGGSEIVMTQSPATLSLSPGERAILSCRASQSVYTKYLGWYQQKPGQAPRLLIYDASTRATGIPDRFSGSGSGTDFTLTINRLEPEDFAVYYCQHYGGSPLITFGQGTKVDIK

SEQ ID NO: 6405 - protein, 248 aa, Artificial Sequence
  source: /note="Description of Artificial Sequence: Synthetic single chain variable fragment"
QVQLVQSGGGLVQPGGSLRLSCAASGFTFSSYAMSWVRQAPGKGLEWVSISGSGGSTYYADSVKGRFTISRDNSKNTLYLQMNSLRAEDTAVYYCAKREAAAGHDWYFDLWGRGTLVTVSSGGGGSGGGGSGGGGSGGGGSDIRVTQSPSSLSASVGDRVTITCRASQSISSYLNWYQQKPGKAPKLLIYAASSLQSGVPSRFSGSGSGTDFTLTISSLQPEDFATYYCQQSYSIPLTFGQGTKVEIK

SEQ ID NO: 6406 - protein, 247 aa, Artificial Sequence
  source: /note="Description of Artificial Sequence: Synthetic single chain variable fragment"
QVQLVQSWAEVKKPGASVKVSCKASGYTFTSYYMHWVRQAPGQGLEWMGLINPSGGSTSYAQKFQGRVTMTRDTSTSTVYMELSNLRSEDTAVYYCARSPRVTTGYFDYWGQGTLVTVSSGGGGSGGGGSGGGGSGGGGSDIQLTQSPSTLSASVGDRVTITCRASQSISSWLAWYQQKPGKAPKLLIYKASSLESGVPSRFSGSGSGTEFTLTISSLQPDDFATYYCQQYSSYPLTFGGGTRLEIK

SEQ ID NO: 6407 - protein, 252 aa, Artificial Sequence
  source: /note="Description of Artificial Sequence: Synthetic single chain variable fragment"
QVQLVQSGAEVRRPGASVKISCRASGDTSTRHYIHWLRQAPGQGPEWMGINPTTGPATGSPAYAQMLQGRVTMTRDTSTRTVYMELRSLRFEDTAVYYCARSVVGRSAPYYFDYWGQGTLVTVSSGGGGSGGGGSGGGGSGGGGSDIQMTQSPSSLSASVGDRVTITCRASQGISDYSAWYQQKPGKAPKLLIYAASTLQSGVPSRFSGSGSGTDFTLTISYLQSEDFATYYCQQYYSYPLTFGGGTKVDIK

SEQ ID NO: 6408 - protein, 249 aa, Artificial Sequence
  source: /note="Description of Artificial Sequence: Synthetic single chain variable fragment"
QVQLQQSGAEVKKPGASVKVSCKASGYTFTNYYMHWVRQAPGQGLEWMGLINPSGGYTTYAQKFQGRLTMTRDTSTSTVYMELSSLRSEDTAVYYCARIRSCGGDCYYFDNWGQGTLVTVSSGGGGSGGGGSGGGGSGGGGSDIQLTQSPSTLSASVGDRVTITCRASENVNIWLAWYQQKPGKAPKLLIYKSSSLASGVPSRFSGSGSGAEFTLTISSLQPDDFATYYCQQYQSYPLTFGGGTKVDIK

SEQ ID NO: 6409 - protein, 262 aa, Artificial Sequence; identical to SEQ ID NO: 6388
  source: /note="Description of Artificial Sequence: Synthetic single chain variable fragment"

SEQ ID NO: 6410 - protein, 246 aa, Artificial Sequence
  source: /note="Description of Artificial Sequence: Synthetic single chain variable fragment"
QITLKESGPALVKPTQTLTLTCTFSGFSLSTAGVHVGWIRQPPGKALEWLALISWADDKRYRPSLRSRLDITRVTSKDQVVLSMTNMQPEDTATYYCALQGFDGYEANWGPGTLVTVSSGGGGSGGGGSGGGGSGGGGSDIVMTQSPSSLSASAGDRVTITCRASRGISSALAWYQQKPGKPPKLLIYDASSLESGVPSRFSGSGSGTDFTLTIDSLEPEDFATYYCQQSYSTPWTFGQGTKVDIK

SEQ ID NO: 6411 - protein, 251 aa, Artificial Sequence
  source: /note="Description of Artificial Sequence: Synthetic single chain variable fragment"
QVQLVQSGAEVKKPGASVKVSCKASGYTFTSYYMHWVRQAPGQGLEWMGLINPSGGSTSYAQKFQGRVTMTRDTSTSTVYMELSSLRSEDTAVYYCARYRLIAVAGDYYYYGMDVWGQGTMVTVSSGGGGSGGGGSGGGGSGGGGSDIQMTQSPSSVASVGDRVTITCRASQGVGRWLAWYQQKPGTAPKLLIYAASTLQGVPSRFSGSGSGTDFTLTINNLQPEDFATYYCQQANSFPLTFGGGTRLEIK

SEQ ID NO: 6412 - protein, 249 aa, Artificial Sequence
  source: /note="Description of Artificial Sequence: Synthetic single chain variable fragment"
QVQLVQSGAEVRAPGASVKISCKASGFTFRGYYIHWVRQAPGQGLEWMGLINPSGGSRAYAQKFQGRVTMTRDTSTSTVYMELSSLRSDDTAMYYCARTASCGGDCYYLDYWGQGTLVTVSSGGGGSGGGGSGGGGSGGGGSDIQMTQSPPTLSASVGDRVTITCRASENVNIWLAWYQQKPGKAPKLLIYKSSSLASGVPSRFSGSGSGAEFTLTISSLQPDDFATYYCQQYQSYPLTFGGGTKVDIK

SEQ ID NO: 6413 - protein, 243 aa, Artificial Sequence
  source: /note="Description of Artificial Sequence: Synthetic single chain variable fragment"
QVQLVQSGGGLVQPGRSLRLSCAASGFTFDDYAMHWVRQAPGKGLEWVSISWNSGSIGYADSVKGRFTISRDNAKNSLYLQMNSLRAEDTAVYYCAKDGSSSWSWGYFDYWGQGTLVTVSSGGGGSGGGGSGGGGSSSELTQDPAVSVALGQTVRTTCQGDALRSYYASWYQQKPGQAPMLVIYGKNNRPSGIPDRFSGSDSGDTASLTITGAQAEDEADYYCNSRDSSGYPVFGTGTKVTVL

SEQ ID NO: 6414 - protein, 245 aa, Artificial Sequence
  source: /note="Description of Artificial Sequence: Synthetic single chain variable fragment"
EVQLVESGGGLVQPGRSLRLSCAASGFTFDDYAMHWVRQAPGKGLEWVSISWNSGSTGYADSVKGRFTISRDNAKNSLYLQMNSLRAEDTALYYCAKDSSSWYGGGSAFDIWGQGTMVTVSSGGGGSGGGGSGGGGSSSELTQDPAVSVALGQTVRITCQGDSLRSYYASWYQQKPGQAPVLVIYGKNNRPSGIPDRFSGSSSGNTASLTITGAQAEDEADYYCNSRGSSGNHYVFGTGTKVTVL

SEQ ID NO: 6415 - protein, 267 aa, Artificial Sequence
  source: /note="Description of Artificial Sequence: Synthetic single chain variable fragment"
MVLLVTSLLLCELPHPAFLLIPDIQQVQLQQSGPELEKPGASVKISCKASGYSFTGYTMNWVKQSHGKSLEWIGLITPYNGASSYNQKFRGKATLTVDKSSSTAYMDLLSLTSEDSAVYFCARGGYDGRGFDYWGQGTTVTVSSGGGGSGGGGSGGGGSDIELTQSPAIMSASPGEKVTMTCSASSSVSYMHWYQQKSGTSPKRWIYDTSKLASGVPGRFSGSGSGNSYSLTISSVEAEDDATYYCQQWSGYPLTFGAGTKLEIKAA

SEQ ID NO: 6416 - protein, 265 aa, Artificial Sequence
  source: /note="Description of Artificial Sequence: Synthetic single chain variable fragment"
MVLLVTSLLLCELPHPAFLLIPDIQQVQLQQSGPELEKPGASVKISCKASGYSFTGYTMNWVKQSHGKSLEWIGLITPYNGASSYNQKFRGKATLTVDKSSSTAYMDLLSLTSEDSAVYFCARGGYDGRGFDYWGQGTTVTVSSGGGGSGGGGSSGGGSDIELTQSPAIMSASPGEKVTMTCSASSSVSYMHWYQQKSGTSPKRWIYDTSKLASGVPGRFSGSGSGNSYSLTISSVEAEDDATYYCQQWSKHPLTFGAGTKLEIK

SEQ ID NO: 6417 - protein, 268 aa, Artificial Sequence
  source: /note="Description of Artificial Sequence: Synthetic single chain variable fragment"
MVLLVTSLLLCELPHPAFLLIPDIQAQVQLVQSGAEVKRPGASVQVSCRASGYSINTYYMQWVRQAPGAGLEWMGVINPSGVTSYAQKFQGRVTLTNDTSTNTVYMQLNSLTSADTAVYYCARWALWGDFGMDVWGKGTLVTVSSGGGGSGGGGSGGGGSDIQMTQSPSTLSASIGDRVTITCRASEGIYHWLAWYQQKPGKAPKLLIYKASSLASGAPSRFSGSGSGTDFTLTISSLQPDDFATYYCQQYSNYPLTFGGGTKLEIKR

SEQ ID NO: 6418 - protein, 259 aa, Artificial Sequence
  source: /note="Description of Artificial Sequence: Synthetic single chain variable fragment"
QVQLQQSGPGLVTPSQTLSLTCAISGDSVSSNSATWNWIRQSPSRGLEWLGRTYYRSKWYNDYAVSVKSRMSINPDTSKNQFSLQLNSVTPEDTAVYYCARGMMTYYYGMDVWGQGTTVTVSSGILGSGGGGSGGGGSGGGGSQPVLTQSSSLSASPGASASLTCTLRSGINVGPYRIYWYQQKPGSPPQYLLNYKSDSDKQQGSGVPSRFSGSKDASANAGVLLISGLRSEDEADYYCMIWHSSAAVFGGGTQLTVLS

SEQ ID NO: 6419 - protein, 493 aa, Artificial Sequence
  source: /note="Description of Artificial Sequence: Synthetic single chain variable fragment"
MALPVTALLLPLALLLHAARPEVQLQQSGGERATPGASVKMSCKTSGYTFTNYWMHWVKQRPGQGLEWIGYINPSSGYTQYNQKFKDKATLTADKSSSTAYIQLSSLTSEDSAVYYCSTYYGDYLFPYWGQGTLVTVSAGGGGSGGGGSGGGGSDVLMTQTPLSLPVSLGDQASISCRSSQDIVYGNGNTYLEWYLQKPGQSPKLLIYKVSNRFSGVPDRFSGSGSGTDFTLKISRVEAEDLGVYYCFQGSHVPYTFGGGTKLEIKRAAAIEVEQKLISEEDLLDNEKSNGTIIHVKGKHLCPSPLFPGPSKPFWVLVVVGGVLACYSLLVTVAFIIFWVRSKRSRLLHSDYMNMTPRRPGPTRKHYQPYAPPRDFAAYRSRVKFSRSADAPAYQQGQNQLYNELNLGRREEYDVLDKRRGRDPEMGGKPRRKNPQEGLYNELQKDKMAEAYSEIGMKGERRRGKGHDGLYQGLSTATKDTYDALHMQALPPR

SEQ ID NO: 6420 - protein, 487 aa, Artificial Sequence
  source: /note="Description of Artificial Sequence: Synthetic single chain variable fragment"
MALPVTALLLPLALLLHAARPEVQLQQSGGERATPGASVKMSCKTSGYTFTNYWMHWVKQRPGQGLEWIGYINPSSGYTQYNQKFKDKATLTADKSSSTAYIQLSSLTSEDSAVYYCSTYYGDYLFPYWGQGTLVTVSAGGGGSGGGGSGGGGSDVLMTQTPLSLPVSLGDQASISCRSSQDIVYGNGNTYLEWYLQKPGQSPKLLIYKVSNRFSGVPDRFSGSGSGTDFTLKISRVEAEDLGVYYCFQGSHVPYTFGGGTKLEIKRAAAIEFMYPPPYLDNERSNGTIIHIKEKHLCHTQSSPKLFWALVVVAGVLFCYGLLVTVALCVIWTNSRRNRLLQSDYMNMTPRRPGLTRKPYQPYAPARDFAAYRPRAKFSRSAETAANLQDPNQLYNELNLGRREEYDVLEKKRARDPEMGGKQQRRRNPQEGVYNALQKDKMAEAYSEIGTKGERRRGKGHDGLYQGLSTATKDTYDALHMQTLAPR

SEQ ID NO: 6421 - protein, 493 aa, Artificial Sequence; identical to SEQ ID NO: 6419
  source: /note="Description of Artificial Sequence: Synthetic single chain variable fragment"

SEQ ID NO: 6422 - protein, 487 aa, Artificial Sequence; identical to SEQ ID NO: 6420
  source: /note="Description of Artificial Sequence: Synthetic single chain variable fragment"

SEQ ID NO: 6423 - protein, 252 aa, Artificial Sequence
  source: /note="Description of Artificial Sequence: Synthetic single chain variable fragment"
EIVLTQSPATLSLSPGERATLSCRASQSVSSYLAWYQQKPGQAPRLLIYDASNRATGIPARFSGSGSGTDFTLTISSLEPEDFAVYYCQQSSNWPRTFGQGTKVEIKRGSTSGSGKPGSGEGSTKGQVQLVESGGGVVQPGRSLRLDCKASGITFSNSGMHWVRQAPGKGLEWVAVIWYDGSKRYYADSVKGRFTISRDNSKNTLFLQMNSLRAEDTAVYYCATNDDYWGQGTLVTVSSSSGGGGSGGGGSC

SEQ ID NO: 6424 - protein, 252 aa, Artificial Sequence; identical to SEQ ID NO: 6423
  source: /note="Description of Artificial Sequence: Synthetic single chain variable fragment"

SEQ ID NO: 6425 - protein, 241 aa, Artificial Sequence
  source: /note="Description of Artificial Sequence: Synthetic single chain variable fragment"
VQLQESGPDLVKPSQSLSLTCTVTGYSITSGYSWHWIRQFPGNKLEWMGYIHYSGDTDYNPSLKSRFSITRDTSKNQFFLQLNSVTTEDTATYYCATPGGFVYWGQGTLVTVSAGGGGSGGGGSGGGGSDVVMTQTPLTLSVTIGQPASISCKSSQSLLDSDGKTYLHWLLQRPGQSPKRLIFLVSKLDSGVPDRFTGSGSGTDFTLKISRVEAEDLGVYYCWQGTHFPQTFGGGTKLEIK

SEQ ID NO: 6426 - protein, 241 aa, Artificial Sequence; identical to SEQ ID NO: 6425
  source: /note="Description of Artificial Sequence: Synthetic single chain variable fragment"

SEQ ID NO: 6427 - protein, 114 aa, Artificial Sequence; identical to SEQ ID NO: 5053
  source: /note="Description of Artificial Sequence: Synthetic single chain variable fragment"

SEQ ID NO: 6428 - protein, 112 aa, Artificial Sequence; identical to SEQ ID NO: 3060
  source: /note="Description of Artificial Sequence: Synthetic single chain variable fragment"

SEQ ID NO: 6429 - protein, 47 aa, Artificial Sequence
  source: /note="Description of Artificial Sequence: Synthetic single chain variable fragment"
EVKLVESGGGLVLPGDSLRLSCATSEFTFTDYYMTWVRQPPRKALEW

SEQ ID NO: 6430 - protein, 112 aa, Artificial Sequence
  source: /note="Description of Artificial Sequence: Synthetic single chain variable fragment"
DVVMTQTPLSLPVSLGDQASISCRSSQSLLKNNGNTFLHWYLQKSGQSPKLLIYKVSNRLSGVPDRFSGSGSGTYFTLKISRVEAEDLGVYFCSQSTHIPYTFGGGTKLEIK

SEQ ID NO: 6431 - protein, 219 aa, Artificial Sequence
  source: /note="Description of Artificial Sequence: Synthetic single chain variable fragment"
DIQMTQSPDSLPVTPGEPASISCRSSQSLLHSNGYNYLDWYLQKAGQSPQLLIYLGSNRASGVPDRFSGSGSGTDFTLKISRVEAEDVGVYYCQQYYNHPTTFGQGTKLEIKRTVAAPSVFIFPPSDEQLKSGTASVVCLLNNFYPREAKVQWKVDNALQSGNSQESVTEQDSKDSTYSLSSTLTLSKADYEKHKVYACEVTHQGLSSPVTKSFNRGEC

SEQ ID NO: 6432 - protein, 240 aa, Artificial Sequence
  source: /note="Description of Artificial Sequence: Synthetic single chain variable fragment"
QVQLQQSGAEVKKPGASVKVSCKASGYTFTGYYMHWVRQAPGQGLEWMGRINPNSGGTNYAQKFQGRVTMTRDTSISTAYMELSRLRSEDTAVYYCARGRYYGMDVWGQGTMVTVSSGGGGSGGGGSGGGGSGGGGSEIVLTQSPATLSLSPGERATISCRASQSVSSNFAWYQQRPGQAPRLLIYDASNRATGIPPRFSGSGSGTDFTLTISSLEPEDFAAYYCHQRSNWLYTFGQGTK

SEQ ID NO: 6433 - protein, 253 aa, Artificial Sequence
  source: /note="Description of Artificial Sequence: Synthetic single chain variable fragment"
QVQLVQSGAEVKKPGASVKVSCKASGYTFTGYYMHWVRQAPGQGLEWMGWINPNSGGTNYAQKFQGRVTMTRDTSISTAYMELSRLRSDDTAVYYCARDLRRTVVTPRAYYGMDVWGQGTTVTVSSGGGGSGGGGSGGGGSGGGGSDIQLTQSPSTLSASVGDRVTITCQASQDISNSLNWYQQKAGKAPKLLIYDASTLETGVPSRFSGSGSGTDFSFTISSLQPEDIATYYCQQHDNLPLTFGQGTKVEIK

SEQ ID NO: 6434 - protein, 246 aa, Artificial Sequence
  source: /note="Description of Artificial Sequence: Synthetic single chain variable fragment"
QVQLVQSGAEVKKPGAPVKVSCKASGYTFTGYYMHWVRQAPGQGLEWMGWINPNSGGTNYAQKFQGRVTMTRDTSISTAYMELSRLRSDDTAVYYCARGEWDGSYYYDYWGQGTLVTVSSGGGGSGGGGSGGGGSGGGGSDIVLTQTPSSLSASVGDRVTITCRASQSINTYLNWYQHKPGKAPKLLIYAASSLQSGVPSRFSGSGSGTDFTLTISSLQPEDFATYYCQQSFSPLTFGGGTKLEIK

SEQ ID NO: 6435 - protein, 242 aa, Artificial Sequence
  source: /note="Description of Artificial Sequence: Synthetic single chain variable fragment"
QVQLVESGGGLVQPGGSLRLSCAASGFTFSSYWMHWVRQVPGKGLVWVSRINTDGSTTTYADSVEGRFTISRDNAKNTLYLQMNSLRDDDTAVYYCVGGHWAVWGQGTTVTVSSGGGGSGGGGSGGGGSGGGGSDIQMTQSPSTLSASVGDRVTITCRASQSISDRLAWYQQKPGKAPKLLIYKASSLESGVPSRFSGSGSGTEFTLTISSLQPDDFAVYYCQQYGHLPMYTFGQGTKVEIK

SEQ ID NO: 6436 - protein, 241 aa, Artificial Sequence
  source: /note="Description of Artificial Sequence: Synthetic single chain variable fragment"
QVQLVQSGAEVEKPGASVKVSCKASGYTFTDYYMHWVRQAPGQGLEWMGWINPNSGGTNYAQKFQGRVTMTRDTSISTAYMELSRLRSDDTAVYYCASGWDFDYWGQGTLVTVSSGGGGSGGGGSGGGGSGGGGSDIVMTQSPSSLSASVGDRVTITCRASQSIRYYLSWYQQKPGKAPKLLIYTASILQNGVPSRFSGSGSGTDFTLTISSLQPEDFATYYCLQTYTTPDFGPGTKVEIK

SEQ ID NO: 6437 - protein, 253 aa, Artificial Sequence
  source: /note="Description of Artificial Sequence: Synthetic single chain variable fragment"
QVQLVQSGAEVKKPGASVKVSCKASGYTFTSYYMHWVRQAPGQGLEWMGIINPSGGSTSYAQKFQGRVTMTRDTSTSTVYMELSSLRSEDTAVYYCARYRLIAVAGDYYYYGMDVWGQGTMVTVSSGGGGSGGGGSGGGGSGGGGSDIQMTQSPSSVSASVGDRVTITCRASQGVGRWLAWYQQKPGTAPKLLIYAASTLQSGVPSRFSGSGSGTDFTLTINNLQPEDFATYYCQQANSFPLTFGGGTRLEIK

SEQ ID NO: 6438 - protein, 250 aa, Artificial Sequence
  source: /note="Description of Artificial Sequence: Synthetic single chain variable fragment"
QVQLVQSGGGVVQPGRSLRLSCAASGFTFSSYAMHWVRQAPGKGLEWVAVISYDGSNKYYADSVKGRFTISRDNSKNTLYLQMNSLRAEDTAVYYCARWKVSSSSPAFDYWGQGTLVTVSSGGGGSGGGGSGGGGSGGGGSEIVLTQSPATLSLSPGERAILSCRASQSVYTKYLGWYQQKPGQAPRLLIYDASTRATGIPDRFSGSGSGTDFTLTINRLEPEDFAVYYCQHYGGSPLITFGQGTRLEIK

SEQ ID NO: 6439 - protein, 246 aa, Artificial Sequence
  source: /note="Description of Artificial Sequence: Synthetic single chain variable fragment"
QVQLQQSGAEVKKPGASVKVSCKTSGYPFTGYSLHWVRQAPGQGLEWMGWINPNSGGTNYAQKFQGRVTMTRDTSISTAYMELSRLRSDDTAVYYCARDHYGGNSLFYWGQGTLVTVSSGGGGSGGGGSGGGGSGGGGSDIQLTQSPSSISASVGDTVSITCRASQDSGTWLAWYQQKPGKAPNLLMYDASTLEDGVPSRFSGSASGTEFTLTVNRLQPEDSATYYCQQYNSYPLTFGGGTKVDIK

SEQ ID NO: 6440 - protein, 248 aa, Artificial Sequence
  source: /note="Description of Artificial Sequence: Synthetic single chain variable fragment"
QVQLVQSGAEVKKPGASVEVSCKASGYTFTSYYMHWVRQAPGQGLEWMGIINPSGGSTGYAQKFQGRVTMTRDTSTSTVHMELSSLRSEDTAVYYCARGGYSSSSDAFDIWGQGTMVTVSSGGGGSGGGGSGGGGSGGGGSDIQMTQSPPSLSASVGDRVTITCRASQDISSALAWYQQKPGTPPKLLIYDASSLESGVPSRFSGSGSGTDFTLTISSLQPEDFATYYCQQFSSYPLTFGGGTRLEIK

SEQ ID NO: 6441 - protein, 255 aa, Artificial Sequence
  source: /note="Description of Artificial Sequence: Synthetic single chain variable fragment"
QVQLVQSGAEVKKPGASVKVSCKASGYTFTSYGISWVRQAPGQGLEWMGWISAYNGNTNYAQKLQGRVTMTTDTSTSTAYMELRSLRSDDTAVYYCARVAGGIYYYYGMDVWGQGTTITVSSGGGGSGGGGSGGGGSGGGGSDIVMTQTPDSLAVSLGERATISCKSSHSVLYNRNNKNYLAWYQQKPGQPPKLLFYWASTRKSGVPDRFSGSGSGTDFTLTISSLQPEDFATYFCQQTQTFPLTFGQGTRLEIN

SEQ ID NO: 6442 - protein, 241 aa, Artificial Sequence
  source: /note="Description of Artificial Sequence: Synthetic single chain variable fragment"
QVQLQQSGAEVKKPGASVKVSCKASGYTFTGYYMHWVRQAPGQGLEWMGWINPNSGGTNYAQNFQGRVTMTRDTSISTAYMELRRLRSDDTAVYYCASGWDFDYWGQGTLVTVSSGGGGSGGGGSGGGGSGGGGSDIRMTQSPSSLSASVGDRVTITCRASQSIRYYLSWYQQKPGKAPKLLIYTASILQNGVPSRFSGSGSGTDFTLTISSLQPEDFATYYCLQTYTTPDFGPGTKVEIK

SEQ ID NO: 6443 - protein, 246 aa, Artificial Sequence
  source: /note="Description of Artificial Sequence: Synthetic single chain variable fragment"
QVQLVQSGAEVKKPGASVKVSCKASGYTFTGYYMHWVRQAPGQGLEWMGRINPNSGGTNYAQKFQGRVTMTTDTSTSTAYMELRSLRSDDTAVYYCARTTTSYAFDIWGQGTMVTVSSGGGGSGGGGSGGGGSGGGGSDIQLTQSPSTLSASVGDRVTITCRASQSISTWLAWYQQKPGKAPNLLIYKASTLESGVPSRFSGSGSGTEFTLTISSLQPDDFATYYCQQYNTYSPYTFGQGTKLEIK

SEQ ID NO: 6444 - protein, 249 aa, Artificial Sequence
  source: /note="Description of Artificial Sequence: Synthetic single chain variable fragment"
QVQLVQSGGGLVKPGGSLRLSCEASGFIFSDYYMGWIRQAPGKGLEWVSYIGRSGSSMYYADSVKGRFTFSRDNAKNSLYLQMNSLRAEDTAVYYCAASPVVAATEDFQHWGQGTLVTVSSGGGGSGGGGSGGGGSGGGGSDIVMTQTPATLSLSPGERATLSCRASQSVTSNYLAWYQQKPGQAPRLLLFGASTRATGIPDRFSGSGSGTDFTLTINRLEPEDFAMYYCQQYGSAPVTFGQGTKLEIK

SEQ ID NO: 6445 - protein, 249 aa, Artificial Sequence
  source: /note="Description of Artificial Sequence: Synthetic single chain variable fragment"
QVQLVQSGAEVRAPGASVKISCKASGFTFRGYYIHWVRQAPGQGLEWMGIINPSGGSRAYAQKFQGRVTMTRDTSTSTVYMELSSLRSDDTAMYYCARTASCGGDCYYLDYWGQGTLVTVSSGGGGSGGGGSGGGGSGGGGSDIQMTQSPPTLSASVGDRVTITCRASENVNIWLAWYQQKPGKAPKLLIYKSSSLASGVPSRFSGSGSGAEFTLTISSLQPDDFATYYCQQYQSYPLTFGGGTKVDIK

SEQ ID NO: 6446 - protein, 244 aa, Artificial Sequence
  source: /note="Description of Artificial Sequence: Synthetic single chain variable fragment"
QVQLVQSGGGLVQPGRSLRLSCAASGFTFDDYAMHWVRQAPGKGLEWVSGISWNSGSIGYADSVKGRFTISRDNAKNSLYLQMNSLRAEDTAVYYCAKDGSSSWSWGYFDYWGQGTLVTVSSGGGGSGGGGSGGGGSSSELTQDPAVSVALGQTVRTTCQGDALRSYYASWYQQKPGQAPMLVIYGKNNRPSGIPDRFSGSDSGDTASLTITGAQAEDEADYYCNSRDSSGYPVFGTGTKVTVL

SEQ ID NO: 6447 - protein, 246 aa, Artificial Sequence
  source: /note="Description of Artificial Sequence: Synthetic single chain variable fragment"
EVQLVESGGGLVQPGRSLRLSCAASGFTFDDYAMHWVRQAPGKGLEWVSGISWNSGSTGYADSVKGRFTISRDNAKNSLYLQMNSLRAEDTALYYCAKDSSSWYGGGSAFDIWGQGTMVTVSSGGGGSGGGGSGGGGSSSELTQEPAVSVALGQTVRITCQGDSLRSYYASWYQQKPGQAPVLVIFGRSRRPSGIPDRFSGSSSGNTASLIITGAQAEDEADYYCNSRDNTANHYVFGTGTKLTVL

SEQ ID NO: 6448 - protein, 246 aa, Artificial Sequence
  source: /note="Description of Artificial Sequence: Synthetic single chain variable fragment"
EVQLVESGGGLVQPGRSLRLSCAASGFTFDDYAMHWVRQAPGKGLEWVSGISWNSGSTGYADSVKGRFTISRDNAKNSLYLQMNSLRAEDTALYYCAKDSSSWYGGGSAFDIWGQGTMVTVSSGGGGSGGGGSGGGGSSSELTQDPAVSVALGQTVRITCQGDSLRSYYASWYQQKPGQAPVLVIYGKNNRPSGIPDRFSGSSSGNTASLTITGAQAEDEADYYCNSRGSSGNHYVFGTGTKVTVL

SEQ ID NO: 6449 - protein, 251 aa, Artificial Sequence
  source: /note="Description of Artificial Sequence: Synthetic single chain variable fragment"
QVQLVQSGGGLVQPGGSLRLSCAASGFTFSSYWMHWVRQAPGKGLVWVSRINSDGSSTSYADSVKGRFTISRDNAKNTLYLQMNSLRAEDTAVYYCVRTGWVGSYYYYMDVWGKGTTVTVSSGGGGSGGGGSGGGGSGGGGSEIVLTQSPGTLSLSPGERATLSCRASQSVSSNYLAWYQQKPGQPPRLLIYDVSTRATGIPARFSGGGSGTDFTLTISSLEPEDFAVYYCQQRSNWPPWTFGQGTKVEIK

SEQ ID NO: 6450 - protein, 250 aa, Artificial Sequence
  source: /note="Description of Artificial Sequence: Synthetic single chain variable fragment"
QVQLVQSGGGVVQPGRSLRLSCAASGFTFSSYGMHWVRQAPGKGLEWVAVISYDGSNKYYADSVKGRFTISRDNSKNTLYLQMNSLRAEDTAVYYCAKGYSRYYYYGMDVWGQGTTVTVSSGGGGSGGGGSGGGGSGGGGSEIVMTQSPATLSLSPGERAILSCRASQSVYTKYLGWYQQKPGQAPRLLIYDASTRATGIPDRFSGSGSGTDFTLTINRLEPEDFAVYYCQHYGGSPLITFGQGTKVDIK

SEQ ID NO: 6451 - protein, 249 aa, Artificial Sequence
  source: /note="Description of Artificial Sequence: Synthetic single chain variable fragment"
QVQLVQSGGGLVQPGGSLRLSCAASGFTFSSYAMSWVRQAPGKGLEWVSAISGSGGSTYYADSVKGRFTISRDNSKNTLYLQMNSLRAEDTAVYYCAKREAAAGHDWYFDLWGRGTLVTVSSGGGGSGGGGSGGGGSGGGGSDIRVTQSPSSLSASVGDRVTITCRASQSISSYLNWYQQKPGKAPKLLIYAASSLQSGVPSRFSGSGSGTDFTLTISSLQPEDFATYYCQQSYSIPLTFGQGTKVEIK

SEQ ID NO: 6452 - protein, 247 aa, Artificial Sequence
  source: /note="Description of Artificial Sequence: Synthetic single chain variable fragment"
QVQLVQSWAEVKKPGASVKVSCKASGYTFTSYYMHWVRQAPGQGLEWMGIINPSGGSTSYAQKFQGRVTMTRDTSTSTVYMELSNLRSEDTAVYYCARSPRVTTGYFDYWGQGTLVTVSSGGGGSGGGGSGGGGSGGGGSDIQLTQSPSTLSASVGDRVTITCRASQSISSWLAWYQQKPGKAPKLLIYKASSLESGVPSRFSGSGSGTEFTLTISSLQPDDFATYYCQQYSSYPLTFGGGTRLEIK

SEQ ID NO: 6453 - protein, 253 aa, Artificial Sequence
  source: /note="Description of Artificial Sequence: Synthetic single chain variable fragment"
QVQLVQSGAEVRRPGASVKISCRASGDTSTRHYIHWLRQAPGQGPEWMGVINPTTGPATGSPAYAQMLQGRVTMTRDTSTRTVYMELRSLRFEDTAVYYCARSVVGRSAPYYFDYWGQGTLVTVSSGGGGSGGGGSGGGGSGGGGSDIQMTQSPSSLSASVGDRVTITCRASQGISDYSAWYQQKPGKAPKLLIYAASTLQSGVPSRFSGSGSGTDFTLTISYLQSEDFATYYCQQYYSYPLTFGGGTKVDIK

SEQ ID NO: 6454 - protein, 249 aa, Artificial Sequence
  source: /note="Description of Artificial Sequence: Synthetic single chain variable fragment"
QVQLQQSGAEVKKPGASVKVSCKASGYTFTNYYMHWVRQAPGQGLEWMGIINPSGGYTTYAQKFQGRLTMTRDTSTSTVYMELSSLRSEDTAVYYCARIRSCGGDCYYFDNWGQGTLVTVSSGGGGSGGGGSGGGGSGGGGSDIQLTQSPSTLSASVGDRVTITCRASENVNIWLAWYQQKPGKAPKLLIYKSSSLASGVPSRFSGSGSGAEFTLTISSLQPDDFATYYCQQYQSYPLTFGGGTKVDIK

SEQ ID NO: 6455 - protein, 262 aa, Artificial Sequence
  source: /note="Description of Artificial Sequence: Synthetic single chain variable fragment"
FGLRWVFLVAILKGVQCEVQLLESGGGLVQPGGSLRLSCAASGFTFSNFGMTWVRQAPGKGLEWVSGVSIRGIATYYADSVKGRFTISRDDSRNTLYLQMNSLRAEDTALYYCATGVRLLGREWGQGTLVTVSSGGGGSGGGGSGGGGSDVVMTQSPLSLPVPLGQPASISCRSSQSLVDNDGNTYLNWFQQRPGQSPRRLIYKVSMRDSGVPDRFTGSGSGTDFTLRISRVEADDVGVYYCMQGTHWPLTFGPGTKVEIKR

SEQ ID NO: 6456 - protein, 111 aa, Artificial Sequence
  source: /note="Description of Artificial Sequence: Synthetic single chain variable fragment"
EVQLVESGGGLVQAGGSLTISCAASGITFSDSIVSWYRRARGKQREWVAGISNGGTTKYAESVLGRFTISRDNAKNMVYLQMNGLNPEDTAVYLCKVRQYWGQGTQVTVSS

SEQ ID NO: 6457 - protein, 114 aa, Artificial Sequence
  source: /note="Description of Artificial Sequence: Synthetic single chain variable fragment"
EVQLVESGGGLVQAGGSLRLSCAASGVDASNSAMGWYRQAPGKQREWVARITGGGLIAYTDSVKGRFTISRDNAKSTVYLQMNSLEPEDTAVYYCNTINSRDGWGQGTQVTVSS

SEQ ID NO: 6458 - protein, 126 aa, Artificial Sequence
  source: /note="Description of Artificial Sequence: Synthetic single chain variable fragment"
EVQLVESGGGLVQPGGSLRLSCAASGFTLDYYAIGWFRQAPGKEREWASSISSSDGSTYYADSVKGRFTISRDNAKNTVFLQMNSLKPEDTAVYSCAASQAPITIATMMKPFYDYWGQGTQVTVSS

SEQ ID NO: 6459 - protein, 123 aa, Artificial Sequence
  source: /note="Description of Artificial Sequence: Synthetic single chain variable fragment"
EVQLVESGGGLVQPGGSLRLSCAASGFTLDYYAKCWFRQAPGKEREWVSCISSSDGSTYYADSVKGRFTISRDNAKNTVYLQMNSLKPEDTAVYFCAARHGGPLTVEYFFDYWGQGTQVTVSS

SEQ ID NO: 6460 - protein, 124 aa, Artificial Sequence
  source: /note="Description of Artificial Sequence: Synthetic single chain variable fragment"
EVQLVESGGGLVQPGGSLRLSCAASGFTFDYYAIGWFRQAPGKAREGVSCISGGDNSTYYADSVKGRFTISRDNAKNTVYLQMNSLKPEDTAVYYCATGGWKYCSGYDPEYIYWGQGTQVTVSS

SEQ ID NO: 6461 - protein, 115 aa, Artificial Sequence
  source: /note="Description of Artificial Sequence: Synthetic single chain variable fragment"
EVQLVESGGGLVQAGGSLRLSCAASGSTFSQYDVGWYRQAPGKQRELVAFSSSGGRTIYPDSVKGRFTFSRDNTKNTVYLQMTSLKPEDTAVYYCKIDWYLNSYWGQGTQVTVSS

SEQ ID NO: 6462 - protein, 120 aa, Artificial Sequence
  source: /note="Description of Artificial Sequence: Synthetic single chain variable fragment"
EVQLVESGGGLVQAGGSLRLSCAASGRTFSSGTMGWFRRAPGKEREFVASIPWSGGRTYYADSVKDRFTISRDNAQNTVFLQMNSLKPEDTAVYYCAFKERSTGWDFASWGQGIQVTVSS

SEQ ID NO: 6463 - protein, 119 aa, Artificial Sequence
  source: /note="Description of Artificial Sequence: Synthetic single chain variable fragment"
EVQLVESGGGLVQAGGSLRLSCAASGSTFSNYVSNYAMGWGRQAPGTQRELVASISNGDTTNYADSVKGRFTISRDNAKNTVYLQMNSLKPEDTAVYYCFEHQVAGLTWGQGTQVTVSS

SEQ ID NO: 6464 - protein, 114 aa, Artificial Sequence
  source: /note="Description of Artificial Sequence: Synthetic single chain variable fragment"
EVQLVESGGGLVEPGGSLRLSCVASGFTFSSYDMSWVRQAPGKGLEWVSTINSGGGITYRGSVKGRFTISRDNAKNTLYLQMNSLKPEDTAVYYCENGGSSYRRGQGTQVTVSS

SEQ ID NO: 6465 - protein, 127 aa, Artificial Sequence
  source: /note="Description of Artificial Sequence: Synthetic single chain variable fragment"
EVQLVESGGGLVQTGGSLRLSCAASGFTLDYYGIGWFRQAPGKEREGVSFISGSDGSTYYAESVKGRFTISRDKAKNTVYLQMNSLKPEDTAVYYCAADPWGPPSIATMTSYEYKHWGQGTQVTVSS

SEQ ID NO: 6466 - protein, 113 aa, Artificial Sequence
  source: /note="Description of Artificial Sequence: Synthetic single chain variable fragment"
EVQLVESGGGLVQPGGSLRLSCAASGFTFSTYTMIWLRRAPGKGFEWVSTIDKDGNTNYVDSVKGRFAVSRDNTKNTLYLQMNSLKPEDTAMYYCTKHGSSARGQGTRVTVSS

SEQ ID NO: 6467 - protein, 118 aa, Artificial Sequence
  source: /note="Description of Artificial Sequence: Synthetic single chain variable fragment"
  MOD_RES (27)..(27): Any amino acid
  MOD_RES (32)..(32): Any amino acid
  MOD_RES (75)..(75): Any amino acid
EVQLVESGGGLVQAGGSLRLSCVASGXALKIXVMGWYRQAPGKQRELVAAITSGGRTNYSDSVKGRFTISGDNAXNTVYLQMNSLKSEDTAVYYCREWNSGYPPVDYWGQGTQVTVSS

SEQ ID NO: 6468 - protein, 250 aa, Artificial Sequence
  source: /note="Description of Artificial Sequence: Synthetic single chain variable fragment"
QAVLTQPPSASGTPGQRVTISCSGSSSNIGSNTVNWYQQLPGTAPKLLIYSNNQRPSGVPDRFSGSKSGTSASLAISGLQSEDEADYYCAAWDDSLNGSYVFGTGTKVTVLGSRGGGGSGGGGSGGGGSLEMAQVQLVQSGAEVRKPGASVKVSCKASGGTFSSYAISWVRQAPGQGLEWMGRIIPILGIANYAQKFQGRVTITADKSTSTAYMELSSLRSEDTAVYYCARHYGQWWDYWGQGTLVTVSS

SEQ ID NO: 6469 - protein, 249 aa, Artificial Sequence
  source: /note="Description of Artificial Sequence: Synthetic single chain variable fragment"
QSVVTQPPAVSGALGQRVTISCTGTTSNIGAGFDVHWYQQRPGAAPKLLISGNTHRPSGVPDRISGSKSGTLASLAITGLQAEDEADYYCQSYDRSLSTILFGGGTKLTVLGSRGGGGSGGGGSGGGGSLEMAQVQLVQSGAEVKKPGSSVKVSCKASGGTFSSHPISWVRQAPGQGLEWMGRIIPMLDIPNNAQKFQGRVTITADKSTDTAYLELSSLTSEDTAVYYCARGLYYYDYWGQGTLVTVSS

SEQ ID NO: 6470 - protein, 249 aa, Artificial Sequence
  source: /note="Description of Artificial Sequence: Synthetic single chain variable fragment"
QSVLTQPPSVSGAPGQRVTISCTGSSSNIGAGFDVHWYQQLPGTAPKLLIFGNSNRPSGVPDRFSGSKSGTSASLAITGLQAEDEADYYCQSYDSSLSGYVFGSGTKVTVLGSRGGGGSGGGGSGGGGSLEMAEVQLVESGAEVKKPGSSVKVSCKASGGTFSSYAISWVRQAPGQGLEWMGRIIPIFGIANYAQKFQGRVTITADKSTSTAYMELSSLRSEDTAVYYCARSMWYMDSWGQGTLVTVSS

SEQ ID NO: 6471 - protein, 247 aa, Artificial Sequence
  source: /note="Description of Artificial Sequence: Synthetic single chain variable fragment"
DIQLTQSPSSLSASVGDRVTITCRASQSISSYLNWYQQKPGKAPKLLIYAASSLQSGVPSRFSGSGSGTDFTLTISSLQPEDFATYYCQQSYSTPRTFGQGTKVEIKRSRGGGGSGGGGSGGGGSLEMAQVQLVQSGAEVKKPGASVKVSCKASGYTFSSYGISWVRQAPGQGLEWMGWISPYNGNTNYAQNLQGRVTMTTDTSTTTAYMELRSLTSDDTAVYYCARYSGYYYVDYWGQGTLVTVSS

SEQ ID NO: 6472 - protein, 251 aa, Artificial Sequence
  source: /note="Description of Artificial Sequence: Synthetic single chain variable fragment"
KLLPVLTQPPSVSVAPGKTARITCGGNNIGSKSVHWYQQKPGQAPVLVIYYDSDRPSGIPERFSGSNSGNTATLTISRVEAGDEADYYCQVWDSITDHYVFGTGTKVTVLGSRGGGGSGGGGSGGGGSLEMAEVQLVESGAEVKKPGSSVKVSCKASGGTFSSYAISWVRQAPGQGLEWMGRIIPILGIANYAQKFQGRVTITADKSTSTAYMELSSLRSEDTAVYYCARQGYVWSEMDFWGQGTLVTVSS

SEQ ID NO: 6473 - protein, 251 aa, Artificial Sequence
  source: /note="Description of Artificial Sequence: Synthetic single chain variable fragment"
KLLPVLTQPHSVSESPGKTVTISCTGSSGSIASNFVQWYQQRPGSAPTTVIYDDNQRPSGVPDRFSASIDRSSNSASLTISGLKTDDEADYYCQSYDGSNVIFGGGTKLTVLGSRGGGGSGGGGSGGGGSLEMAEVQLVESGAEVKKPGASVKVSCKASGYTFTSYYMHWVRQAPGQGLEWMGIINPSGGSTSYAQKFQGRVTMTRDTSTSTVYMELSSLRSEDTAVYYCAAGSYYSLDIWGQGTMVTVSS

SEQ ID NO: 6474 - protein, 247 aa, Artificial Sequence
  source: /note="Description of Artificial Sequence: Synthetic single chain variable fragment"
QPVLTQPPSVSVAPGETASVSCGGNNFGSQSVHWYQQKSGQAPLLVIYYDQDRPSEIPARFSGSKSGNTATLTISRVEAGDEADYYCQVWDTYTDHVVFGGGTKLTVLGSRGGGGSGGGGSGGGGSLEMAEVQLVQSGAEVEKPGASVKVSCKASGYTFSSYYMDWVRQAPGQGLEWMGRINPTSGSTTYAQKFQGRVTMTRDTSTFTVYMDLSSLRSEDTAVYYCARSGGGYGDSWGQGTLVTVSS

SEQ ID NO: 6475 - protein, 245 aa, Artificial Sequence
  source: /note="Description of Artificial Sequence: Synthetic single chain variable fragment"
EIQLQQSGPELVKPGASVKMSCKASGYTFTDYYMHWVKQNNGESLEWIGYFNPYNDYTRYNQNFNGKATLTVDKSSSTAYMQLNSLTSEDSAFYYCARSDGYYDAMDYWGQGTSVTVSSGGGGSGGGGSSGGGGSDVQITQSPSYLAASPGETITINCRASKSISKYLAWYQEKPGKANKLLIHSGSTLQSGIPSRFSGSGSGTDFTLTISSLEPEDFAMYYCQQHIEYPWTFGGGTKLEIKRAS

SEQ ID NO: 6476 - protein, 244 aa, Artificial Sequence
  source: /note="Description of Artificial Sequence: Synthetic single chain variable fragment"
DVQITQSPSYLAASPGETITINCRASKSISKYLAWYQEKPGKANKLLIHSGSTLQSGIPSRFSGSGSGTDFTLTISSLEPEDFAMYYCQQHIEYPWTFGGGTKLEIKRAGGGGSGGGGSSGGGGSEIQLQQSGPELVKPGASVKMSCKASGYTFTDYYMHWVKQNNGESLEWIGYFNPYNDYTRYNQNFNGKATLTVDKSSSTAYMQLNSLTSEDSAFYYCARSDGYYDAMDYWGQGTSVTVSS

SEQ ID NO: 6477 - protein, 242 aa, Artificial Sequence
  source: /note="Description of Artificial Sequence: Synthetic single chain variable fragment"
DIQMTQSPSAMSASVGDRVTITCRASKSISKYLAWFQQKPGKVPKLRIHSGSTLQSGVPSRFSGSGSGTEFTLTISSLQPEDFATYYCQQHIEYPWTFGQGTKVEIKRGGGGSGGGGSGGGGSEVQLVQSGAEVKKPGATVKISCKASGYTFTDYYMHWVQQAPGKGLEWMGYFNPYNDYTRYAEKFQGRVTITADTSTDTAYMELSSLRSEDTAVYYCARSDGYYDAMDYWGQGTTVTVSS

SEQ ID NO: 6478 - protein, 242 aa, Artificial Sequence
  source: /note="Description of Artificial Sequence: Synthetic single chain variable fragment"
DIQMTQSPSAMSASVGDRVTITCRASKSISKYLAWFQQKPGKVPKLRIHSGSTLQSGVPSRFSGSGSGTEFTLTISSLQPEDFATYYCQQHIEYPWTFGQGTKVEIKRGGGGSGGGGSGGGGSQVQLVQSGAEVKKPGASVKVSCKASGYTFTDYYMHWVRQAPGQGLEWMGYFNPYNDYTRYAQKFQGRVTMTRDTSISTAYMELSSLRSDDTAVYYCARSDGYYDAMDYWGQGTTVTVSS

SEQ ID NO: 6479 - protein, 244 aa, Artificial Sequence
  source: /note="Description of Artificial Sequence: Synthetic single chain variable fragment"
EVQLVQSGAEVKKPGATVKISCKASGYTFTDYYMHWVQQAPGKGLEWMGYFNPYNDYTRYAEKFQGRVTITADTSTDTAYMELSSLRSEDTAVYYCARSDGYYDAMDYWGQGTTVTVSSGGGGSGGGGSGGGGSDIQMTQSPSAMSASVGDRVTITCRASKSISKYLAWFQQKPGKVPKLRIHSGSTLQSGVPSRFSGSGSGTEFTLTISSLQPEDFATYYCQQHIEYPWTFGQGTKVEIKRAS

SEQ ID NO: 6480 - protein, 244 aa, Artificial Sequence
  source: /note="Description of Artificial Sequence: Synthetic single chain variable fragment"
QVQLVQSGAEVKKPGASVKVSCKASGYTFTDYYMHWVRQAPGQGLEWMGYFNPYNDYTRYAQKFQGRVTMTRDTSISTAYMELSSLRSDDTAVYYCARSDGYYDAMDYWGQGTTVTVSSGGGGSGGGGSGGGGSDIQMTQSPSAMSASVGDRVTITCRASKSISKYLAWFQQKPGKVPKLRIHSGSTLQSGVPSRFSGSGSGTEFTLTISSLQPEDFATYYCQQHIEYPWTFGQGTKVEIKRAS

SEQ ID NO: 6481 - protein, 250 aa, Artificial Sequence
  source: /note="Description of Artificial Sequence: Synthetic single chain variable fragment"
METDTLLLWVLLLWVPGSTGEVQLVQSGAEVKKPGASVKISCKTSGYTFTEYTIHWVKQASGKGLEWIGNINPNNGGTTYNQKFEDRATLTVDKSTSTAYMELSSLRSEDTAVYYCAAGWNFDYWGQGTTVTVSSSGGGGDIVMTQSPSSLSASVGDRVTITCKASQDVGTAVDWYQQKPGKAPKLLIYWASTRHTGVPDRFTGSGSGTDFTLTISSLQPEDFADYFCQQYNSYPLTFGGGTKLEIKGGC

SEQ ID NO: 6482 - protein, 253 aa, Artificial Sequence
  source: /note="Description of Artificial Sequence: Synthetic single chain variable fragment"
METDTLLLWVLLLWVPGSTGEVQLVQSGAEVKKPGASVKISCKTSGYTFTEYTIHWVKQASGKGLEWIGNINPNNGGTTYNQKFEDRATLTVDKSTSTAYMELSSLRSEDTAVYYCAAGWNFDYWGQGTTVTVSSGGGSGGGGDIVMTQSPSSLSASVGDRVTITCKASQDVGTAVDWYQQKPGKAPKLLIYWASTRHTGVPDRFTGSGSGTDFTLTISSLQPEDFADYFCQQYNSYPLTFGGGTKLEIKGGC

SEQ ID NO: 6483 - protein, 250 aa, Artificial Sequence
  source: /note="Description of Artificial Sequence: Synthetic single chain variable fragment"
METDTLLLWVLLLWVPGSTGDIVMTQSPSSLSASVGDRVTITCKASQDVGTAVDWYQQKPGKAPKLLIYWASTRHTGVPDRFTGSGSGTDFTLTISSLQPEDFADYFCQQYNSYPLTFGGGTKLEIKSGGGGEVQLVQSGAEVKKPGASVKISCKTSGYTFTEYTIHWVKQASGKGLEWIGNINPNNGGTTYNQKFEDRATLTVDKSTSTAYMELSSLRSEDTAVYYCAAGWNFDYWGQGTTVTVSSGGC

SEQ ID NO: 6484 - protein, 253 aa, Artificial Sequence
  source: /note="Description of Artificial Sequence: Synthetic single chain variable fragment"
METDTLLLWVLLLWVPGSTGDIVMTQSPSSLSASVGDRVTITCKASQDVGTAVDWYQQKPGKAPKLLIYWASTRHTGVPDRFTGSGSGTDFTLTISSLQPEDFADYFCQQYNSYPLTFGGGTKLEIKGGGSGGGGEVQLVQSGAEVKKPGASVKISCKTSGYTFTEYTIHWVKQASGKGLEWIGNINPNNGGTTYNQKFEDRATLTVDKSTSTAYMELSSLRSEDTAVYYCAAGWNFDYWGQGTTVTVSSGGC

SEQ ID NO: 6485 - protein, 265 aa, Artificial Sequence
  source: /note="Description of Artificial Sequence: Synthetic single chain variable fragment"
MAQVQLQESGPGLVKPSQSLSLTCSVTGYSITSNYWGWIRKFPGNKMEWMGYISYSGSTSYNPSLKSRISITRDTSKNQLFLQLNSVTTEDTATYYCARYSLFNYGRRDYVMDAWGQGTTVTVSSGGGGSGGGGSGGGGSDIELTQSPATMAASPGEKVTITCRASSTVSYMHWFQQKPGASPKPWIYDTSKLASGVPDRFSGSGSGTDFTLTIDPVQADDIATYYCQQSKDDPRTFGGGTKLELKRRPQVRRCRIRIRWNRVPH

SEQ ID NO: 6486 - protein, 261 aa, Artificial Sequence
  source: /note="Description of Artificial Sequence: Synthetic single chain variable fragment"
MAQVKLQQSGPELVKPGASVKMSCKASGYTFTSYVMHWVKQSNGKSLEWIGTIDPYYGGTSYNQKFKGKATLTVDKSSTTAYIQLKSLTSEDSAVYYCARWDGYYGGFSYWGQGTMVTVSSGGGGSGGGGSGGGGSDIELTQSPAIMSATLGEKVTMSCRASSNVKYMYWYQQKSGASPKLWIYYTSNLASGVPARFSGSGSGTSYSLTISSVEAEDAATYYCQQFTSSPYTFGSGTKLEIKRAAAGAPVPYPDPLEPRAA

SEQ ID NO: 6487 - protein, 260 aa, Artificial Sequence
  source: /note="Description of Artificial Sequence: Synthetic single chain variable fragment"
DIQLTQSPSSLSASVGDRVTITCSASQDISNYLNWYQQKPGKAPKVLIYFTSSLHSGVPSRFSGSGSGTDFTLTISSLQPEDFATYYCQQYSTVPWTFGQGTKVEIKRGSTSGSGKPGSGEGSTKGEVQLVESGGGLVQPGGSLRLSCAASGYDFTHYGMNWVRQAPGKGLEWVGWINTYTGEPTYAADFKRRFTFSLDTSKSTAYLQMNSLRAEDTAVYYCAKYPYYYGTSHWYFDVWGQGTLVTVSSGGGGSGGGGSC

SEQ ID NO: 6488 - protein, 260 aa, Artificial Sequence; identical to SEQ ID NO: 6487
  source: /note="Description of Artificial Sequence: Synthetic single chain variable fragment"

SEQ ID NO: 6489 - protein, 251 aa, Artificial Sequence
  source: /note="Description of Artificial Sequence: Synthetic single chain variable fragment"
QSVLTQPPSVSGAPGQRVTISCTGSSSNIGAGYDVHWYQQLPGTAPKLLIYGNSNRPSGVPDRFSGSKSGTSASLAITGLQAEDEADYYCQSYDSSLSGYVFGTGTKVTVLGSRGGGGSGGGGSGGGGSLEMAQVQLVQSGAEVKKPGSSVKVSCKASGGTFSSYAISWVRQAPGQGLEWMGGIIPIFGKGNYPQKFQGRVTITADESTGTAYMELSSLRSEDTAVYYCARHIPTFSFDYWGQGTLVTVSS

SEQ ID NO: 6490 - protein, 257 aa, Artificial Sequence
  source: /note="Description of Artificial Sequence: Synthetic single chain variable fragment"
QIVLSQSPAILSASPGEKVTMTCRASSSVSYIHWFQQKPGSSPKPWIYATSNLASGVPVRFSGSGSGTSYSLTISRVEAEDAATYYCQQWTSNPPTFGGGTKLEIKRGSTSGSGKPGSGEGSTKGQVQLQQPGAELVKPGASVKMSCKASGYTFTSYNMHWVKQTPGRGLEWIGAIYPGNGDTSYNQKFKGKATLTADKSSSTAYMQLSSLTSEDSAVYYCARSTYYGGDWYFNVWGAGTTVTVSAGGGGSGGGGSC

SEQ ID NO: 6491 - protein, 257 aa, Artificial Sequence; identical to SEQ ID NO: 6490
  source: /note="Description of Artificial Sequence: Synthetic single chain variable fragment"

SEQ ID NO: 6492 - protein, 265 aa, Artificial Sequence
  source: /note="Description of Artificial Sequence: Synthetic single chain variable fragment"
MALPVTALLLPLALLLHAARPQVQLQQSGAELVRPGASVTLSCKASGYTFSDYEMHWVIQTPVHGLEWIGAIDPETGGTAYNQKFKGKAILTADKSSSTAYMELRSLTSEDSAVYYCTGYYDYDSFTYWGQGTLVTVSAGGGGSGGGGSGGGGSDIVMTQSQKIMSTTVGDRVSITCKASQNVDAAVAWYQQKPGQSPKLLIYSASNRYTGVPDRFTGSGSGTDFTLTISNMQSEDLADYFCQQYDIYPYTFGGGTKLEIKRSDP

SEQ ID NO: 6493 - protein, 234 aa, Artificial Sequence
  source: /note="Description of Artificial Sequence: Synthetic single chain variable fragment"
  MOD_RES (208)..(208): Any amino acid
  MOD_RES (211)..(211): Any amino acid
  MOD_RES (214)..(214): Any amino acid
QITLKESGGGLVKPGGSLRLSCAASGFTFSNAWMSWVRQAPGKGLEWVGRIRSKTDGGTTDYAALVKGRFTISRDDSENTLYLQMNSLKTEDTAVYYCARDFGRWSYYFDYWSQGTLVTVSSSYELTQPPSVSVSPGQTASITCSGDKLGDKYACWYQQKPGQSPVLVIYQDSKRPSGIPERFSGSNSGNTATLTISGTQAMDEADYXAAXAAXAAAWDSSTVVFGGGTKLTVL

SEQ ID NO: 6494 - protein, 232 aa, Artificial Sequence
  source: /note="Description of Artificial Sequence: Synthetic single chain variable fragment"
  MOD_RES (208)..(208): Any amino acid
  MOD_RES (211)..(211): Any amino acid
QITLKESGGGLVKPGGSLRLSCAASGFTFSNAWMSWVRQAPGKGLEWVGRIRSKTDGGTTDYAALVKGRFTISRDDSENTLYLQMNSLKTEDTAVYYCARDFGRWSYYFDYWSQGTLVTVSSSYELTQPPSVSVSPGQTASITCSGDKLGDKYACWYQQKPGQSPVLVIYQDSKRPSGIPERFSGSNSGNTATLTISGTQAMDEADYXAAXAAQAWDSSTVVFGGGTKLTVL

SEQ ID NO: 6495 - protein, 242 aa, Artificial Sequence
  source: /note="Description of Artificial Sequence: Synthetic single chain variable fragment"
  MOD_RES (187)..(187): Any amino acid
  MOD_RES (209)..(209): Any amino acid
  MOD_RES (218)..(218): Any amino acid
  MOD_RES (221)..(221): Any amino acid
  MOD_RES (224)..(224): Any amino acid
  MOD_RES (227)..(227): Any amino acid
QITLKESGGGLVKPGGSLRLSCAASGFTFSNAWMSWVRQAPGKGLEWVGRIKSKTDGGTTDYAAPVKGRFTISRDDSKNTLYLQMNSLKTEDTAVYYCARDFGRWSYYFDYWSQGTLVTVSSQSVLTQPPSVSVAPGQTARITCGGNNIGTKSVHWYQQKPGQAPVLVLYDESDRPSGIPERFSGSXAASGNTATLTISRVEAGDEADXAALLSGVGXAAXAAXAAXAASLCFGSGTKLTVL

SEQ ID NO: 6496 - protein, 234 aa, Artificial Sequence
  source: /note="Description of Artificial Sequence: Synthetic single chain variable fragment"
  MOD_RES (187)..(187): Any amino acid
  MOD_RES (209)..(209): Any amino acid
QITLKESGGGLVKPGGSLRLSCAASGFTFSNAWMSWVRQAPGKGLEWVGRIKSKTDGGTTDYAAPVKGRFTISRDDSKNTLYLQMNSLKTEDTAVYYCARDFGRWSYYFDYWSQGTLVTVSSQSVLTQPPSVSVAPGQTARITCGGNNIGTKSVHWYQQKPGQAPVLVLYDESDRPSGIPERFSGSXAASGNTATLTISRVEAGDEADXAALLQVWDSSSDHYVFGSGTKLTVL

SEQ ID NO: 6497 - protein, 214 aa, Artificial Sequence
  source: /note="Description of Artificial Sequence: Synthetic single chain variable fragment"
  MOD_RES (4)..(4): Any amino acid
  MOD_RES (13)..(13): Any amino acid
RSPXAARSLGEAXAAVKPGGSLRLSCAASGFTFSNAWMSGSAQAPGKGLEWVGRIKSKTDGGTTDYAAPVKGRFTISRDDSKNTLYLQMNSLKTEDTAVYYCARDFGRWSYYFDYWSQGTLVTVSSEIVMTQSPSFLSASVGDRVTITCRASQGISSYLAWYQQKPGKAPKLLIYAASTLQSGSHQGFSGSGSGTEFTLTISSLQPEDFATYYC

SEQ ID NO: 6498 - protein, 210 aa, Artificial Sequence
  source: /note="Description of Artificial Sequence: Synthetic single chain variable fragment"
  MOD_RES (208)..(208): Any amino acid
QVTLKESGGGLVKPGGSLRLSCAASGFTFQRLDEWVRQAPGKGLEWVGRIKSKTDGGTTDYAAPVKGRFTISRDDSKNTLYLQMNSLKTEDTAVYYCARDFGRWSYYFDYWSQGTLVTVSSQSALTQDPAVSVALGTDSQDHMPRRQPQKTIMQWYQQKPGQAPALVIYGKNDRPSGIPDRFSGSTSGNTASLTITGAQAEDEADYYXAA

SEQ ID NO: 6499 - protein, 228 aa, Artificial Sequence
  source: /note="Description of Artificial Sequence: Synthetic single chain variable fragment"
QVQLVESGGGLVKPGGSLRLSCAASGFTFSNAWMSWVRQAPGKGLEWVGRIKSKTDGGTTDYAAPVKGRFTISRDDSKNSLYLQMNSLKTEDTAVYYCARDFGRWSYYFDYWGQGTLVTVSSVLTQPPSVSVAPGKTARITCGGNNLGSKNVHWYQQKPGQAPVLVIYDDDNRPSGIPERFSGSNSGNTATLTISRVEAGDEADYYCQVWDSSSRHVVFGGGTKLTVL

SEQ ID NO: 6500 - protein, 232 aa, Artificial Sequence
  source: /note="Description of Artificial Sequence: Synthetic single chain variable fragment"
QVTLKESGGGLVKPGGSLRLSCAASGFTFSNAWMSWVRQAPGKGLEWVGRIKSKTDGGTTDYAAPVKGRFTISRDDSKNTLYLQMNSLRTEDTAVYYCARDFGRWSYYFDYWSQGTLVTVSSQPVLTQPHSVSESPGKTVTISCTRSSGNIASNFVQWYQRRPDGATTNVIYEDTQRPSGVSGRFSGSIDRSSNSASLTISGLRAEDEADYYCQSYDGRNLMFGGGTKVTVL

SEQ ID NO: 6501 - protein, 232 aa, Artificial Sequence
  source: /note="Description of Artificial Sequence: Synthetic single chain variable fragment"
EVQLVESGGGLVKPGGSLRLSCAASGFTFSNAWMSWVRQAPGKGLEWVGRIKSKTDGGTTDYAAPVKGRFTISRDDSKNTLYLQMNSLRTEDTAVYYCARDFGRWSYYFDYWSQGTLVTVSSQPVLTQPHSVSESPGKTVTISCTRSSGNIASNFVQWYQRRPDGATTNVIYEDTQRPSGVSGRFSGSIDRSSNSASLTISGLRAEDEADYYCQSYDGRNLMFGGGTKVTVL

SEQ ID NO: 6502 - protein, 229 aa, Artificial Sequence
  source: /note="Description of Artificial Sequence: Synthetic single chain variable fragment"
EVQLVESGGGLVQPGRSLRLSCTASGFTFGDYAMSWVRQAPGKGLEWVSSISGSGRSTDHADYVKGRFTISRDNSKNTVYLQMNRLRAEDTAVYYCAKVSNYEYYFDYWAQGTLVTVSSQPVLTQPHSVSESPGKTVTISCTRSSGSIASNYVQWYQQRPGSAPTTVIYEDNQRPSGVPDRFSGSIDSSSNSASLTISGLKTEDEADYYCQSYDSSNHVFGTGTKLTVL

SEQ ID NO: 6503 - protein, 229 aa, Artificial Sequence
  source: /note="Description of Artificial Sequence: Synthetic single chain variable fragment"
QVTLKESGGGLVKPGGSLRLSCAASGFTFSNAWMSWVRQAPGKGLEWVGRIKSKTDGGTTDYAAPVKGRFTISRDDSKNTLYLQMNSLKTEDTAVYYCARDFGRWSYYFDYWSQGTLVTVSSNIQMTQSPSSLSASVGDRVTITCRASQSINKWLAWYQQKPGKAPKLLIHDASTLESGVPSRFSGSGSGTEFTLTISSLHPDDSATYYCQQLKSPPAQFGEGTKLEIK

SEQ ID NO: 6504 - protein, 229 aa, Artificial Sequence
  source: /note="Description of Artificial Sequence: Synthetic single chain variable fragment"
QVTLKESGGGLVKPGGSLRLSCAASGFTFSNAWMSWVRQAPGKGLEWVGRIKSKTDGGTTDYAAPVKGRFTISRDDSKNTLYLQMNSLKTEDTAVYYCARDFGRWSYYFDYWSQGTLVTVSSNIQMTQSPSSLSASVGDRVTITCRASQSINKWLAWYQQKPGKAPKLLIHDASTLESGVPSRFSGSGSGTEFTLTISSLHPDDSATYYCQQLKSRPLSFGEGTKLEIK

SEQ ID NO: 6505 - protein, 229 aa, Artificial Sequence
  source: /note="Description of Artificial Sequence: Synthetic single chain variable fragment"
EVQLVESGGGLVKPGGSLRLSCAASGFTFSNAWMSWVRQAPGKGLEWVGRIKSKTDGGTTDYAAPVKGRFTISRDDSKNTLYLQMNSLKTEDTAVYYCARDFGRWSYYFDYWSQGTLVTVSSNIQMTQSPSSLSASVGDRVTITCRASQSINKWLAWYQQKPGKAPKLLIHDASTLESGVPSRFSGSGSGTEFTLTISSLHPDDSATYYCQQLKSPPAQFGEGTKLEIK

SEQ ID NO: 6506 - protein, 229 aa, Artificial Sequence
  source: /note="Description of Artificial Sequence: Synthetic single chain variable fragment"
EVQLVESGGGLVKPGGSLRLSCAASGFTFSNAWMSWVRQAPGKGLEWVGRIKSKTDGGTTDYAAPVKGRFTISRDDSKNTLYLQMNSLKTEDTAVYYCARDFGRWSYYFDYWSQGTLVTVSSNIQMTQSPSSLSASVGDRVTITCRASQSINKWLAWYQQKPGKAPKLLIHDASTLESGVPSRFSGSGSGTEFTLTISSLHPDDSATYYCQQLKSRPLSFGEGTKLEIK

SEQ ID NO: 6507 - protein, 232 aa, Artificial Sequence
  source: /note="Description of Artificial Sequence: Synthetic single chain variable fragment"
QVTLKESGGGLVKPGGSLRLSCAASGFTFSNAWMSWVRQAPGKGLEWVGRIKSKTDGGTTDYAAPVKGRFTISRDDSKNTLYLQMNSLKTEDTAVYYCARDFGRWSYYFDYWSQGTLVTVSSQSVLTQPSSVSGTPGQRVTISCSGSSSNIGSNYVYWYQQLPGTAPKLLIYRNNQRPSGVPDRFSGSKSGTSASLGHQWAPGPRMRLIITAAWDDSLSGVVFGGGTKLTVL

SEQ ID NO: 6508 - protein, 232 aa, Artificial Sequence
  source: /note="Description of Artificial Sequence: Synthetic single chain variable fragment"
EVQLVESGGGLVKPGGSLRLSCAASGFTFSNAWMSWVRQAPGKGLEWVGRIKSKTDGGTTDYAAPVKGRFTISRDDSKNTLYLQMNSLKTEDTAVYYCARDFGRWSYYFDYWSQGTLVTVSSQSVLTQPSSVSGTPGQRVTISCSGSSSNIGSNYVYWYQQLPGTAPKLLIYRNNQRPSGVPDRFSGSKSGTSASLGHQWAPGPRMRLIITAAWDDSLSGVVFGGGTKLTVL

SEQ ID NO: 6509 - protein, 227 aa, Artificial Sequence
  source: /note="Description of Artificial Sequence: Synthetic single chain variable fragment"
EVQLVESGGGLVQPGRSLRLSCTASGFTFGDYAMSWVRQAPGKGLEWVSSISGSGRSTDHADYVKGRFTISRDNSKNTVYLQMNRLRAEDTAVYYCAKVSNYEYYFDYWAQGTLVTVSSQSVLTQPPSVSVAPGQTARITCGGNNIGSTSVHWFQQKPGQAPVLVVYDDSDRPSGIPERFSGSNSGNTATLTISRVEAGDEADYYCQVWDNDSDHRVFGGGTKLTVL

SEQ ID NO: 6510 - protein, 229 aa, Artificial Sequence
  source: /note="Description of Artificial Sequence: Synthetic single chain variable fragment"
EVQLVESGGGLVQPGRSLRLSCTASGFTFGDYAMSWVRQAPGKGLEWVSSISGSGRSTDHADYVKGRFTISRDNSKNTVYLQMNRLRAEDTAVYYCAKVSNYEYYFDYWAQGTLVTVSSQSVLTQPPSVPGTPGQRVTITCSGSRFNIGSNTVNWYQQLPGTAPKLLIYSNNQRPSGVPDRFSGSKSGTSASLAISGLQSEDEADYYCAAWDDSLNGYVFGTGTKLTVL

SEQ ID NO: 6511 - protein, 234 aa, Artificial Sequence
  source: /note="Description of Artificial Sequence: Synthetic single chain variable fragment"
  MOD_RES (194)..(194): Any amino acid
QVQLVESGGGLVKPGRSLRLSCTASGFTFGDYAMSWFRQAPGKGLEWVGFIRSKAYGGTTEYAASVKGRFTISRDDSKSIAYLQMNSLKTEDTAVYYCAKDFEVREAHLSYFDYWGQGTLVTVSSQSVLTQPPSVSVAPGQTARITCGGNRIGTKAVHWYQQKSGQAPVLVVRDDTDRPSGSLRDSLAPTLGTXAAATLTISGVEAGDEADYYQVWDSSSDHRVFGGGTKLTVL

SEQ ID NO: 6512 - protein, 234 aa, Artificial Sequence
  source: /note="Description of Artificial Sequence: Synthetic single chain variable fragment"
  MOD_RES (194)..(194): Any amino acid
EVQLVESGGGLVKPGRSLRLSCTASGFTFGDYAMSWFRQAPGKGLEWVGFIRSKAYGGTTEYAASVKGRFTISRDDSKSIAYLQMNSLKTEDTAVYYCAKDFEVREAHLSYFDYWGQGTLVTVSSQSVLTQPPSVSVAPGQTARITCGGNRIGTKAVHWYQQKSGQAPVLVVRDDTDRPSGSLRDSLAPTLGTXAAATLTISGVEAGDEADYYQVWDSSSDHRVFGGGTKLTVL

SEQ ID NO: 6513 - protein, 247 aa, Artificial Sequence
  source: /note="Description of Artificial Sequence: Synthetic single chain variable fragment"
QEQLVESGGRLVTPGGSLTLSCKASGFDFSAYYMSWVRQAPGKGLEWIATIYPSSGKTYYATWVNGRFTISSDNAQNTVDLQMNSLTAADRATYFCARDSYADDGALFNIWGPGTLVTISSGGGGSGGGGSGGGGSELVLTQSPSVSAALGSPAKITCTLSSAHKTDTIDWYQQLQGEAPRYLMQVQSDGSYTKRPGVPDRFSGSSSGADRYLIIPSVQADDEADYYCGADYIGGYVFGGGTQLTVT

SEQ ID NO: 6514 - protein, 269 aa, Artificial Sequence
  source: /note="Description of Artificial Sequence: Synthetic single chain variable fragment"
EFGSATMGWSCIILFLVATATGVHSDIKMTQSPSSMYASLGERVTITCKASPDINSYLSWFQQKPGKSPKTLIYRANRLVDGVPSRFSGGGSGQDYSLTINSLEYEDMGIYYCLQYDEFPYTFGGGTKLEMKGSTSGSGKPGSGEGSTKGEVKLVESGGGLVKPGGSLKLSCAASGFTFSSYAMSWVRQIPEKRLEWVASISRGGTTYYPDSVKGRFTISRDNVRNILYLQMSSLRSEDTAMYYCGRYDYDGYYAMDYWGQGTSVTVSS

SEQ ID NO: 6515 - protein, 244 aa, Artificial Sequence
  source: /note="Description of Artificial Sequence: Synthetic single chain variable fragment"
DIKMTQSPSSMYASLGERVTITCKASPDINSYLSWFQQKPGKSPKTLIYRANRLVDGVPSRFSGGGSGQDYSLTINSLEYEDMGIYYCLQYDEFPYTFGGGTKLEMKGSTSGSGKPGSGEGSTKGEVKLVESGGGLVKPGGSLKLSCAASGFTFSSYAMSWVRQIPEKRLEWVASISRGGTTYYPDSVKGRFTISRDNVRNILYLQMSSLRSEDTAMYYCGRYDYDGYYAMDYWGQGTSVTVSS

SEQ ID NO: 6516 - protein, 265 aa, Artificial Sequence; identical to SEQ ID NO: 6492
  source: /note="Description of Artificial Sequence: Synthetic single chain variable fragment"

SEQ ID NO: 6517 - protein, 255 aa, Artificial Sequence
  source: /note="Description of Artificial Sequence: Synthetic single chain variable fragment"
DIQMTQSPSSLSASVGDRVTITCSASSSVSYMNWYQQTPGKAPKRWIYDTSKLASGVPSRFSGSGSGTDYTFTISSLQPEDIATYYCQQWSSNPFTFGQGTKLQITRGSTSGSGKPGSGEGSTKGQVQLVQSGGGVVQPGRSLRLSCKASGYTFTRYTMHWVRQAPGKGLEWIGYINPSRGYTNYNQKVKDRFTISRDNSKNTAFLQMDSLRPEDTGVYFCARYYDDHYSLDYWGQGTPVTVSSGGGGSGGGGSC

SEQ ID NO: 6518 - protein, 255 aa, Artificial Sequence; identical to SEQ ID NO: 6517
  source: /note="Description of Artificial Sequence: Synthetic single chain variable fragment"

SEQ ID NO: 6519 - protein, 246 aa, Artificial Sequence
  source: /note="Description of Artificial Sequence: Synthetic single chain variable fragment"
EVQLVETGGGLVQPGKSLELTCATSGFTFNTAWMHWVRQSPDKRLEWIARIKDTSNNYATDYVESMKGRFTISRDDSKGSVNLQMNSLKEEDTATYYCTTDFYDGTYYWNYWGQGVMVTVSSGGGGSGGGGSGGGGSSYELIQPPSAAVTLGNTVSLTCVGDELPKRYAYWYQQKPDQSIVRVIYEDSVRPPGISDRFSGSSSGTTATLTIRDAQNEDEADYYCQSTYGDDKLYIFGGGTKLTVLG

SEQ ID NO: 6520 - protein, 257 aa, Artificial Sequence
  source: /note="Description of Artificial Sequence: Synthetic single chain variable fragment"
DIQMTQSPSSLSASVGDRVTITCRASQDVNTAVAWYQQKPGKAPKLLIYSASFLYSGVPSRFSGSRSGTDFTLTISSLQPEDFATYYCQQHYTTPPTFGQGTKVEIKRGSTSGSGKPGSGEGSTKGEVQLVESGGGLVQPGGSLRLSCAASGFNIKDTYIHWVRQAPGKGLEWVARIYPTNGYTRYADSVKGRFTISADTSKNTAYLQMNSLRAEDTAVYYCSRWGGDGFYAMDYWGQGTLVTVSSGGGGSGGGGSC

SEQ ID NO: 6521 - protein, 257 aa, Artificial Sequence; identical to SEQ ID NO: 6520
  source: /note="Description of Artificial Sequence: Synthetic single chain variable fragment"

SEQ ID NO: 6522 - protein, 247 aa, Artificial Sequence
  source: /note="Description of Artificial Sequence: Synthetic single chain variable fragment"
QVQLVESGGGVVQPGRSLRLSCAASGFTFSSYAMHWVRQAPGKGLEWVAVISYDGSNKYYADSVKGRFTISRDNSKNTLYLQMNSLRAEDTAVYYCARAHNSSSWSFDYWGQGTLVTVSSGGGGSGGGGSGGGASDIQMTQSPSSLSASVGDRVTITCRASQSISSYLNWYQQKPGKAPKLLIYDASNLETGVPSRFSGSGSGTDFTFTISSLQPEDIATYYCQQYDNLPLTFGGGTKVDIKRTAAA

SEQ ID NO: 6523 - protein, 246 aa, Artificial Sequence
  source: /note="Description of Artificial Sequence: Synthetic single chain variable fragment"
EVQLLESGGGVVQPGRSLRLSCAASGFTFSSYAMHWVRQAPGKGLEWVAVISYDGSNKYYADSVKGRFTISRDNSKNTLYLQMNSLRAEDTAVYYCAKGGDTYGFLDNWGQGTMVTVSSGGGGSGGGGSGGGASDIQMTQSPSTLSASVGDRVTITCRASQSISSWLAWYQQKPGKAPKLLIYKASSLESGVPSRFSGSGSGTDFTLTISSLQPEDFATYYCQQFNAYPLTFGGGTKVEIKRTAAA

SEQ ID NO: 6524 - protein, 246 aa, Artificial Sequence
  source: /note="Description of Artificial Sequence: Synthetic single chain variable fragment"
QVQLVESGGGLVQPGRSLRLSCAASGFTFSSYAMHWVRQAPGKGLEWVAVISYDGSSKYYADSVKGRFTISRDNSKNTLYLQMNSLRAEDTAVYYCAKGGGSFGAFDIWGQGTLVTVSSGGGGSGGGGSGGGASDIQMTQSPSSLSASVGDRVTITCRASQSISRYLNWYQQKPGKAPNLLIYAASSLQSGVPSRFSGSGSGTDFTLTISSLQPEDFATYYCQQYNSYPLTFGGGTKLEIKRTAAA

SEQ ID NO: 6525 - protein, 246 aa, Artificial Sequence
  source: /note="Description of Artificial Sequence: Synthetic single chain variable fragment"
EVQLLESGGGAVQPGRSLRLSCAASGFTFSSYAMHWVRQAPGKGLEWVAVISYDGSNKYYADSVKGRFTISRDNSKNTLYLQMNSLRAEDTAVYYCASGYSSSWYLDYWGQGTLVTVSSGGGGSGGGGSGGGASDIQMTQSPSSVSASVGDRVTITCQASQDISNYLNWYQQKPGKAPKLLIYDASNLETGVPSRFSGSGSGTDFTFTISSLQPEDIATYYCQQYDNLPLTFGGGTKVEIKRTAAA

SEQ ID NO: 6526 - protein, 245 aa, Artificial Sequence
  source: /note="Description of Artificial Sequence: Synthetic single chain variable fragment"
QVQLVESGAEVKKPGASVKVSCKASGYTFTGYYMHWVRQAPGQGLEWMGRINPNSGGTNYAQKFQGRVTMTRDTSISTAYMELSRLRSDDTAVYYCASGGAGWNWGQGTMVTVSSGGGGSGGGGSGGGASNFMLTQPHSVSESPGKTATISCTRSSGSIASNYVQWYQQRPGSAPTTVIYEDNQRPFGVPDRFSGSIDSSSNSASLTISGLKTEDEADYYCQSHDSSNVVFGGGTQLTVLGQPAA

SEQ ID NO: 6527 - protein, 247 aa, Artificial Sequence
  source: /note="Description of Artificial Sequence: Synthetic single chain variable fragment"
  MOD_RES (101)..(101): Any amino acid
EVQLVESGGGVVQPGRSLRLSCAASGFTFSSYAMHWVRQAPGKGLEWVAVISYDGSNKYYADSVKGRFTISRDNSKNTLYLQMNSLRAEDTAVYYCARGYXASSWSQGLWGQGTLVTVSSGGGGSGGGGSGGGASDIQMTQSPSSLSASVRDRVTITCQASQDISNYLNWYQQKPGKAPKLLIYDASNLETGVPSRFSGSGSGTDFTFTISSLQPEDIATYYCQQYDNLPPTFGGGTKVEIKRTAAA

SEQ ID NO: 6528 - protein, 251 aa, Artificial Sequence
  source: /note="Description of Artificial Sequence: Synthetic single chain variable fragment"
QVQLVESGGGVVQPGRSLRLSCAASGFTFSSYGMHWVRQAPGKGLEWVAVISYDGSNKYYADSVKGRFTISRDNSKNTLYLQMNSLRAEDTAVYYCAKDLGGSGGAFDIWGQGTLVTVSSGGGGSGGGGSGGGASDIVMTQTPHSLSVTPGQPASISCKSSQSLLYSDGKTYLYWYLQKPGQPPQLLIYEVSNRFSGVPDRFSGSGSGTDFTLKISRVEAEDVGVYYCMQSIQLYTFGQGTKVDIKRTAAA

SEQ ID NO: 6529 - protein, 244 aa, Artificial Sequence
  source: /note="Description of Artificial Sequence: Synthetic single chain variable fragment"
QVQLVESGGGVVQPGRSLRLSCAAPGFTFSSYGMHWVRQAPGKGLEWVAVISYDGSNKYYADSVKGRFTISRDNSKNTLYLQMNSLRAEDTAVYYCARNKQYGMDVWGQGTLVTVSSGGGGSGGGGSGGGASDIVMTQSPATLSLAPGERATLSCRASQSVGSNLAWYQQKPGQAPSLLIYDASTRATGIPARFSGSGSGTDFTLTISSLQSEDIAVYYCQQYHRWPLTFGGGTKVEIKRTAAA

SEQ ID NO: 6530 - protein, 249 aa, Artificial Sequence
  source: /note="Description of Artificial Sequence: Synthetic single chain variable fragment"
EVQLLESGGGVVQPGRSLRLSCAASGFTFSSYGMHWVRQAPGKGLEWVAVISYDGSNKYYADSVKGRFTISRDNSKNTLYLQMNSLRAEDTAVYYCAKDDGAMRYWGQGTMVTVSSGGGGSGGGGSGGGASDIQMTQSPDSLAVSLGERATINCKSSQSVLYSSNNKNYLAWYQQKPGQPPKLLIYWASTRESGVPDRFSGSGSGTDFTLTISSLQAEDVAVYYCQQYYDSPYTFGQGTKVDIKRTAAA

SEQ ID NO: 6531 - protein, 244 aa, Artificial Sequence
  source: /note="Description of Artificial Sequence: Synthetic single chain variable fragment"
QVQLVESGGGVVQPGRPLRLSCAASGFTFSSYAMHWVRQAPGKGLEWVAVISYDGSNKYYADSVKGRFTISRDNSKNTLYLQMNSLRAEDTAVYYCARAGYSYADYWGQGTMVTVSSGGGGSGGGGSGGGASDIQMTQSPSSLSASVGDRVTITCRASQGIRNDLGWYQQKPGKAPKRLIYAASSLQSGVPSRFSGSGSGTEFTLTISSLQPEDFATYYCLQHNSYPLTFGGGTKVDIKRTAAA

SEQ ID NO: 6532 - protein, 252 aa, Artificial Sequence
  source: /note="Description of Artificial Sequence: Synthetic single chain variable fragment"
EVRLQQSGPDLIKPGASVKMSCKASGYTFTGYVMHWVKQRPGQGLEWIGFINPYNDDIQSNERFRGKATLTSDKSSTTAYMELSSLTSEDSAVYYCARGAGYNFDGAYRFFDFWGQGTTLTVSSGGGGSGGGGSGGGGSDVVMTQSPLSLPVSLGDQASISCRSSQRLVHSNGNTYLHWYLQKPGQSPKLLIYRVSNRFPGVPDRFSGSGSGTDFTLKISRVEAEDLGIYFCSQSTHVPYTFGGGTKLEIKR

SEQ ID NO: 6533 - protein, 249 aa, Artificial Sequence
  source: /note="Description of Artificial Sequence: Synthetic single chain variable fragment"
EVQLVESGGGVVQPGGSLRLSCAASGFTFSSYAMSWVRQAPGKGLEWVSAISGSGGSTYYADSVKGRFSISRDNSKNTLYLQMNSLRAEDTAVYYCARTRSSGAFDIWGQGTLVTVSSGGGGSGGGGSGGGASNFMLTQPHSVSESPGKTVTISCTRSSGSIASKYVQWYQQRPGSSPTTVIYEDNQRPSGVPDRFSGSIDTSSNSASLTISGLRTEDEADYYCHSYDSNNHSVFGGGTKVTVLGQPAA

SEQ ID NO: 6534 - protein, 246 aa, Artificial Sequence
  source: /note="Description of Artificial Sequence: Synthetic single chain variable fragment"
QVQLVESGAEVKKPGASVKVSCKASGYTFTGYYMHWVRQAPGQGLEWMGRINPNSGGTNYAQKFQGRVTMTRDTSISTAYMELSRLRSDDTAVYYCASPRGRGSAFDIWGQGTLVTVSSGGGGSGGGGSGGGASSYELTQPPSVSVSPGQTATISCSGDQLGGKYGHWYQKKPGQSPVLVLYQDRKRPAGIPERFSGSSSGNTITLTISGTQAVDEADYYCQAWDTNLGGVFGGGTKVTVLGQPAA

SEQ ID NO: 6535 - protein, 249 aa, Artificial Sequence
  source: /note="Description of Artificial Sequence: Synthetic single chain variable fragment"
QVQLVESGGGLVKPGGSLRLSCAASGFTFSDYYMSWIRQAPGKGLEWVSYISSSGSTIYYADSVEGRFTISRDNAKNSLYLQMNSLRTEDTAVYYCARARVGGMDVWGQGTMVTVSSGGGGSGGGGSGGGASNFMLTQPHSVSESPGKTVTISCTRSSGSIASNYVQWYQQRPGSSPTTVIYEDNQRPSGVPDRFSGSIDSSSNSASLTISGLKTEDEADYYCQSFDADNLHVVFGGGTKLTVLGQPAA

SEQ ID NO: 6536 - protein, 248 aa, Artificial Sequence
  source: /note="Description of Artificial Sequence: Synthetic single chain variable fragment"
EVQLVQSGAEVKKPGASVKVSCKASGYTFTGYYMHWVRQAPGQGLEWMGWINPNSGGTNYAQKFQGRVTMTRDTSISTAYMELSSLRSEDTAVYYCARDTGPIDYWGQGTMVTVSSGGGGSGGGGSGGGASDIVMTQTPLSLSVTPGQPASISCKSSQSLLHSDGKTYLYWYLQKPGQPPQLLVYEVSNRFSGVPDKFSGSGSGTDFTLKISRVEAEDVGVYYCMQGIQLPPTFGGGTKVDIKRTAAA

SEQ ID NO: 6537 - protein, 249 aa, Artificial Sequence
  source: /note="Description of Artificial Sequence: Synthetic single chain variable fragment"
EVQLVQSGAEVKKPGSSVKVSCKASGGTFSSYAISWVRQAPGQGLEWMGIINPSGGSTSYAQKFQGRVTMTRDTSTSIVYMELSSLRSEDTAVYYCARGVWNSGSYLGFDYWGQGTLVTVSSGGGGSGGGGSGGGASDIQMTQSPSSLSASVGDRVTITCQASQDISNYLNWYQQKPGKAPKLLIYAASSLQSGVPSRFSGSGSGTDFTLTISSLQPEDFATYYCQQSYSTPLTFGGGTKLEIKRTAAA

SEQ ID NO: 6538 - protein, 251 aa, Artificial Sequence
  source: /note="Description of Artificial Sequence: Synthetic single chain variable fragment"
EVQLVESGGGVVQPGRSLRLSCAASGFTFSSYAMHWVRQAPGKGLEWVAVISYDGSNKYYADSVKGRFTISRDNSKNTLYLQMNSLRAEDTAVYYCARGGFTVPGGAFDIWGQGTLVTVSSGGGGSGGGGSGGGASNFMLTQPHSVSDSPGKTVTISCTRSSGRIGSNFVQWYQQRPGSSPTTVIYEDDQRPSGVPARFSGSIDSSSNSASLTISGLTTADEAGYYCQSYDASNVIFGGGTKLTVLGQPAA

SEQ ID NO: 6539 - protein, 247 aa, Artificial Sequence
  source: /note="Description of Artificial Sequence: Synthetic single chain variable fragment"
EVQLVESGAEVKKPGASVKVSCKASGYTFTGYYMHWVRQAPGQGLEWMGRINPNSGGTNYAQKFQGRVTMTRDTSISTAYMELSSLRSEDTAVYYCARFGERYAFDIWGQGTLVTVSSGGGGSGGGGSGGGASQSELTQPPSASGSPGQSVTISCTGTSTDVGAFHFVSWYQHTPGKAPKLLISEVRKRASGVPDRFSGSRSGNTASLTVSGLQSEDEADYFCSAYTGSNYVFGSGTKLTVLGQPAA

SEQ ID NO: 6540 - protein, 252 aa, Artificial Sequence
  source: /note="Description of Artificial Sequence: Synthetic single chain variable fragment"
QVQLQQSGPGLVKPSQTLSLTCAISGDSVSSNSAAWNWIRQSPSRGLEWLGRTYYRSKWYNDYAVSVKSRITINPDTSKNQFSLQLNSVTPEDTAVYYCARDQWLANYYYYGMDVWGQGTLVTVSSGGGGSGGGGSGGGASSYELTQPLSVSVALGQTARITCGGNNIGSKNVHWYQQKPGQAPVLVIYRDNNRPSGIPERFSGSNSGNTATLTISKAQAGDEADYYCQVWDSNSWVFGGGTKLTVLGQPAA

SEQ ID NO: 6541 - protein, 252 aa, Artificial Sequence
  source: /note="Description of Artificial Sequence: Synthetic single chain variable fragment"
QMQLVQSGAEVKKPGASVKVSCKASGYTFASYYMHWVRQAPGQGLEWMGIINPSGGSTSYAQKFQGRVTMTRDTSTSTVYMELSRLRSDDTAVYYCASNRGGSYKSVGMDVWGQGTTVTVSSGGGGSGGGGSGGGASNFMLTQPQSVSESPGKTVTISCTRSSGNFASKYVQWYQQRPGSSPTTVIYENYQRPSGVPDRFSGSIDSSSNSATLTISGLKTEDEADYYCQSYDEVSVVFGGGTQLTVLGQPAA

SEQ ID NO: 6542 - protein, 249 aa, Artificial Sequence
  source: /note="Description of Artificial Sequence: Synthetic single chain variable fragment"
EVQLVQSGAEVKKPGSSVKVSCEASGYTFTSYAISWVRQAPGQGLEWMGWMNPNSGNTGYAQKFQGRVTMTRNTSISTAYMELSSLRSEDTAVYYCARVSSYYGMDVWGQGTLVTVSSGGGGSGGGGSGGGASNFMLTQPLSVSESPGKTVTISCTRSSGSIASNYVQWYQQRPGSAPTTVIYEDNQRPSGVPDRFSGSIDSSSNSASLTISGLKTEDEADYYCQSYNSSNHWVFGGGTKVTVLGQPAA

SEQ ID NO: 6543 - protein, 243 aa, Artificial Sequence
  source: /note="Description of Artificial Sequence: Synthetic single chain variable fragment"
QVTLKESGPGILKPSQTLSLTCSFSGFSLSTSGMGVGWIRQPSGKGLEWLAHIWWDDDKYYNPSLKSQLTISKDTSRNQVFLKITSVDTADTATYYCSRRPRGTMDAMDYWGQGTSVTVSSGGGGSGGGGSGGGGSDIVMTQAASSLSASLGDRVTISCRASQDISKYLNWYQQKPDGTVKLLIYYTSRLHSGVPSRFSGSGSGTDYSLTIRNLEQEDIATYFCQQVYTLPWTFGGGTKLEIK

SEQ ID NO: 6544 - protein, 245 aa, Artificial Sequence
  source: /note="Description of Artificial Sequence: Synthetic single chain variable fragment"
QVTLKESGPGILKPSQTLSLTCSFSGFSLNTSGMGVGWIRQPSGKGLEWLAHIWWDDDKYYNPSLKSQLTISKDTSRNQVFLKITSVDTADSATYYCARRASHVSTVDSFDFWGQGTTLTVSSGGGGSGGGGSGGGGSDIQMTQTTSSLSASLGDRVTISCRASQDISNYLNWFQQKPDGTVKLLIYYTSRLHSGVPSKFSGSGSGTDYSLTISNLEQEDIATYFCQQGYTLPWTFGGGTKLEIK

SEQ ID NO: 6545 - protein, 240 aa, Artificial Sequence
  source: /note="Description of Artificial Sequence: Synthetic single chain variable fragment"
QVTLESGPGILPSQTLSLTCSFSGFSLSTSGMGVGWIRQPSGKGLEWLAHIWWDDDKYYNPSLKSQLTISDTSRNQVFLKITSVDTADTATYYCSRRPRGTMDAMDYWGQGTSVTVSSGGGGSGGGGSGGGGSDIVMTQAASSLSASLGDRVTISCRASQDISKYLNWYQQKPDGTVKLLIYYTSRLHSGVPSRFSGSGSGTDYSLTIRNLEQEDIATYFCQQVYTLPWTFGGGTKLEIK

SEQ ID NO: 6546 - protein, 242 aa, Artificial Sequence
  source: /note="Description of Artificial Sequence: Synthetic single chain variable fragment"
QVTLKESGPGILKPSQTLSLTCSFSGFSLNTSGMGVGWIRQPSGKGLEWLAHIWWDDDKYYNPSLKSQLTISKDTSRNQVFLKITSVDTADSATYYCARRASHVSTVDSFDFWGQGTTLTVSSGGGGSGGGGSGGGGSDIQMTQTTSSLSASLGDRVTISCRASQDISNYLNWFQQPDGTVLLIYYTSRLHSGVPSFSGSGSGTDYSLTISNLEQEDIATYFCQQGYTLPWTFGGGTKLEIK

SEQ ID NO: 6547 - protein, 253 aa, Artificial Sequence
  source: /note="Description of Artificial Sequence: Synthetic single chain variable fragment"
EVQLLESGGGLVQPGGSLRLSCAASGFTFSGYAMSWVRQAPGKGLEWVSSIYSSSGSKYYADSVKGRFTISRDNSKNTLYLQMNSLRAEDTAVYYCARASSTCTRTWCSYDDAMDVWGQGTLVTVSSGGGGSGGGGSGGGGSQSVLTQPPSASGTPGQRVTISCTGSSSNIGNNAVTWYQQLPGTAPKLLIYDDSHRPSGVPDRFSGSKSGTSASLAISGLRSEDEADYYCGTWDYSLSGYVFGGGTKLTVLG

SEQ ID NO: 6548 - protein, 247 aa, Artificial Sequence
  source: /note="Description of Artificial Sequence: Synthetic single chain variable fragment"
EVQLLESGGGLVQTGGSLRLSCAASGFTFSDYAMSWVRQAPGKGLEWVSSIYPGSGSKYYADSVKGRFAISRDNSKNTLYLQMNSLRAEDTAVYYCARDAWFRGHNVFDYWGQGTLVTVSSGGGGSGGGGSGGGGSQSVLTQPPSASGTPGQRVTISCTGSSSNIGSNNVTWYQQLPGTAPKLLIYSDSHRPSGVPDRFSGSKSGTSASLAISGLQSEDEADYYCGSWDYSLSAYVFGGGTKLTVLG

SEQ ID NO: 6549 - protein, 253 aa, Artificial Sequence
  source: /note="Description of Artificial Sequence: Synthetic single chain variable fragment"
EVQLLESGGGLVQPGGSLRLSCAASGFTFSNYDMSWVRQAPGKGLEWVSGIYPNGGSKYYADSVKGRFTISRDNSKNTLYLQMNSLRAEDTAVYYCARALRQCQRYWCSYADGMDVWGQGTLVTVSSGGGGSGGGGSGGGGSQSVLTQPPSASGTPGQRVTISCTGSSSNIGSNYVSWYQQLPGTAPKLLIYADSQRPSGVPDRFSGSKSGTSASLAISGLRSEDEADYYCGTWDYSLSGYVLGGGTKLTVLG

SEQ ID NO: 6550 - protein, 247 aa, Artificial Sequence
  source: /note="Description of Artificial Sequence: Synthetic single chain variable fragment"
EVQLLESGGGLVQPGGSLRLSCAASGFTFSDYYMSWVRQAPGKGLEWVSAIYSGGGSIYYADSVKGRFTISRDNSKNTLYLQMNSLRAEDTAVYYCARDVQWNKAPRFDYWGQGTLVTVSSGGGGSGGGGSGGGGSQSVLTQPPSASGAPGQRVTISCSGSSSNIGSNDVSWYQQLPGTAPKLLIYADSNRPSGVPDRFSGSKSGTSASLAISGLRSEDEADYYCGSWDYSLSGYVFGGGTKLTVLG

SEQ ID NO: 6551 - protein, 247 aa, Artificial Sequence
  source: /note="Description of Artificial Sequence: Synthetic single chain variable fragment"
EVQLLESGGGLVQPGGSLRLSCAASGFTFSSYSMSWVRQAPGKGLEWVSGISHGGGNKYYADSVKGRFTISRDNSKNTLYLQMNSLRAEDTAVYYCARDLRANNDTGFDYWGQGTLVTVSSGGGGSGGGGSGGGGTQSVLTQPPSSSGTPGQRVTISCTGSSSNIGSNAVTWYQQLPGTAPKLLIYDDNHRPSGVPDRFSGSKSGTSASLAISGLRSEDEADYYCGAWDYSLNAYVFGGGTKLTVLG

SEQ ID NO: 6552 - protein, 253 aa, Artificial Sequence
  source: /note="Description of Artificial Sequence: Synthetic single chain variable fragment"
EVQLLESGGGLVQPGGSLRLSCAASGFTFSNYDMSWVRQAPGKGLEWVSLISHGGGNIYYADSVKGRFTISRDNSKNTLYLQMNSLRAEDTAVYYCARVPVMCTNHWCSYANGMDVWGQGTLVTVSSGGGGSGGGGSGGGGSQSVLTQPPSASGTPGQRVIISCSASSSNIGSNAVYWYQQLPGTAPKLLIYSDNQRPSGVPDRFSGSKSGTSASLAISGLRSEDEADYYCGSWDYSLSAYVFGGGTKLTVLG

SEQ ID NO: 6553 - protein, 247 aa, Artificial Sequence
  source: /note="Description of Artificial Sequence: Synthetic single chain variable fragment"
EVQLLESGGGLVQPGGSLRLSCAASGFTFSGYAMSWVRQAPGKGLEWVSGISHDGGNTYYADSVKGRFTISRDNSKNTLYLQMNSLRAEDTAVYYCARDRRKGPSTEFDYWGQGTLVTVSSGGGGSGGGGSGGGGSQSVLTQPPSLSGTPGQRVTISCTGSSSNIGSNSVSWYQQLPGTAPKLLIYDDNNRPSGVPDRFSGSKSGTSASLAISGLRSEDEADYYCGAWDYSLSAYVFGGGTKLTVLG

SEQ ID NO: 6554 - protein, 253 aa, Artificial Sequence
  source: /note="Description of Artificial Sequence: Synthetic single chain variable fragment"
EVQLLESGGGLVQTGGSLRLSCAASGFTFSDYAMSWVRQAPGKGLEWVSWIYPGDSSIYYADSVKGRFTISRDNSKNTLYLQMNSLRAEDTAVYYCARLLSIDQAQLHYYYDAMDVWGQGTLVTVSSGGGGSGGGGSGGGGSQSVLTQPPSPSGTPGQRVTISCTGSSSNIGNYYVYWYQQLPGTAPKLLIYANSHRPSGVPDRFSGSKSGTSASLAISGLRSEDEADYYCGSWDDSLSAYVFGGGTKLTVLG

SEQ ID NO: 6555 - protein, 255 aa, Artificial Sequence
  source: /note="Description of Artificial Sequence: Synthetic single chain variable fragment"
EVQLLESGGGLVQPGGSLRLSCAASGFTFSWYDMDWVRQAPGKGLEWVSVISPSGGWTAYADSVKGRFTISRDNSKNTLYLQMNSLRAEDTAVYYCARDSSGYYSPDAFDIWGQGTLVTVSSVGSGGSGGGGSGGGGSGGGGSGGSGGNIQMTQSPSSLSASVGDRVTITCRASQSISSYLNWYQQKPGKAPKLLIYDASSLQSGVPLRFSGSGSGTDFTLTISSLQPEDFATYYCQQSYSTPLTFGGGTKVDIK

SEQ ID NO: 6556 - protein, 248 aa, Artificial Sequence
  source: /note="Description of Artificial Sequence: Synthetic single chain variable fragment"
EVQLLESGGGLVQPGGSLRLSCAASGFTFSGYIMWWVRQAPGKGLEWVSVISPSGGDTWYADSVKGRFTISRDNSKNTLYLQMNSLRAEDTAVYYCATAGDYWGQGTLVTVSSVGSGGSGGGGSGGGGSGGGGSGGSGGQSELTQPPSASGTPGQRVTISCSGSSSNIGRNPVNWYQHLPGTAPKLLIYGDNQRPSGVPDRFSGSRSGTSASLAISGLQSEDEADYYCAAWDDSLNGVVFGGGTKLTV

SEQ ID NO: 6557 - protein, 254 aa, Artificial Sequence
  source: /note="Description of Artificial Sequence: Synthetic single chain variable fragment"
EVQLLESGGGLVQPGGSLRLSCAASGFTFSKYDMHWVRQAPGKGLEWVSVISPSGGWTSYADSVKGRFTISRDNSKNTLYLQMNSLRAEDTAMYYCARDDYSKGRDAFDIWGQGTLVTVSSVGSGGSGGGGSGGGGSGGGGSGGSGGDIQLTQSPSSLSASVGDRVTITCRASQSISSYLNWYQQKPGKAPKLLIYAASSLQSGVPSRFSGSGSGTDFTLTISSLQPEDFATYYCQQSYSTPYTFGQGTKLEIK

SEQ ID NO: 6558 - protein, 254 aa, Artificial Sequence
  source: /note="Description of Artificial Sequence: Synthetic single chain variable fragment"
EVQLLESGGGLVQPGGSLRLSCAASGFTFSWYDMVWVRQAPGKGLEWVSVISPSGGWTSYADSVKGRFTISRDNSKNTLYLQMNSLRAEDTAVYYCARDHSGYDSEYFDYWGQGTLVTVSSVGSGGSGGGGSGGGGSGGGGSGGSGGNIQMTQSPSSLSASVGDRVTITCRASQSISSYLNWYQQKPGKAPKLLIYAASSLQSGVPSRFSGSGSGTDFTLTISSLQPEDFATYYCQQSYSTPYTFGQGTKLEIK

SEQ ID NO: 6559 - protein, 251 aa, Artificial Sequence
  source: /note="Description of Artificial Sequence: Synthetic single chain variable fragment"
AIQMTQSPSSLSASVGDRVTITCRASQSISSYLNWYQQKPGKAPKLLIHAASNLQSGVPSRFSGSGSGTDFTLTISSLQPEDFATYYCQQSYSTPLTFGGGTKVEIKLGSGGSGGGGSGGGGSGGGGSGGSGGEVQLLESGGGLVQPGGSLRLSCAASGFTFSHYEMGWVRQAPGKGLEWVSYISSSGGWTAYADSVKGRFTISRDNSKNTLYLQMNSLRAEDTAVYYCARIGYADAFDIWGQGTTVTVSS

SEQ ID NO: 6560 - protein, 252 aa, Artificial Sequence
  source: /note="Description of Artificial Sequence: Synthetic single chain variable fragment"
EVQLLESGGGLVQPGGSLRLSCAASGFTFSTYDMHWVRQAPGKGLEWVSVISPSGGWTAYADSVKGRFTISRDNSKNTLYLQMNSLRAEDTAVYYCARAAAGYDAFDIWGQGTMVTVSSVGSGGSGGGGSGGGGSGGGGSGGSGGEIVLTQSPSPLSASVGDRVTITCRASHNINKYLNWYQQKPGKAPKLLIFGASSLRSGVPSRFSGSGSGTDFTLTISSLEPEDLATYFCQQTYNTPLTFGGGTKLEIK

SEQ ID NO: 6561 - protein, 260 aa, Artificial Sequence
  source: /note="Description of Artificial Sequence: Synthetic single chain variable fragment"
MDFQVQIFSFLLISASVIMSRGDIQMTQSPSSVSASIGDRVTITCRASQGIDNWLGWYQQKPGKAPKLLIYDASNLDTGVPSRFSGSGSGTYFTLTISSLQAEDFAVYFCQQAKAFPPTFGGGTKVDIKGSTSGSGKPGSGEGSEVQLVQSGGGLVKPGGSLRLSCAASGFTFSSYSMNWVRQAPGKGLEWVSSISSSSSYIYYADSVKGRFTISRDNAKNSLYLQMNSLRAEDTAVYYCARVTDAFDIWGQGTMVTVSS

SEQ ID NO: 6562 - protein, 265 aa, Artificial Sequence
  source: /note="Description of Artificial Sequence: Synthetic single chain variable fragment"
MGWSCIILFLVATATGVHSEVQLVETGGGLVQPGNSLKLSCATSGFIFSTTWMNWIRQTPGKRLEWLAQIEDKSNNYFISYSESVKGRFTISRDDSKSSVYLQMNNLKEEDTAIYYCSWKYRSNYYFDYWGQGVMVTVSSGSTSGSGKPGSGEGSDIVLTQSPALAVSLEQRATISCKTSQNVDYYGISYLHWYQQKPGQQPKLLIYEGSNLASGIPARFSGSGSGTDFTLTIDPVEADDIVTYYCQQSKDYPYTFGAGTKLELK

SEQ ID NO: 6563 - protein, 251 aa, Artificial Sequence
  source: /note="Description of Artificial Sequence: Synthetic single chain variable fragment"
QSVLTQPPSVSGAPGQRVTISCTGSSSNIGAGYDVHWYQQLPGTAPKLLIYGNSNRPSGVPDRFSGSKSGTSASLAISGLQSEDEADYYCAAWDDSLNGYVFGTGTKLTVLGSRGGGGSGGGGSGGGGSLEMAEVQLVETGGGLLQPGGSLRLSCAASGFSVSGTYMGWVRQAPGKGLEWVALLYSGGGTYHPASLQGRFIVSRDSSKNMVYLQMNSLKAEDTAVYYCAKGGAGGGHFDSWGQGTLVTVSS

SEQ ID NO: 6564 - protein, 243 aa, Artificial Sequence
  source: /note="Description of Artificial Sequence: Synthetic single chain variable fragment"
DVQLVQSGAEVKKPGASVKVSCKASGYTFTRYTMHWVRQAPGQGLEWIGYINPSRGYTNYADSVKGRFTITTDKSTSTAYMELSSLRSEDTATYYCARYYDDHYCLDYWGQGTTVTVSSGEGTSTGSGGSGGSGGADDIVLTQSPATLSLSPGERATLSCRASQSVSYMNWYQQKPGKAPKRWIYDTSKVASGVPARFSGSGSGTDYSLTINSLEAEDAATYYCQQWSSNPLTFGGGTKVEIK

SEQ ID NO: 6565 - protein, 250 aa, Artificial Sequence
  source: /note="Description of Artificial Sequence: Synthetic single chain variable fragment"
QTVVTQPPSASGTPGQRVTISCSGSSSNIGSNYVYWYQQLPGTAPKLLIYRSNQRPSGVPDRFSGSKSGTSASLAISGPRSVDEADYYCAAWDDSLNGVVFGGGTKLTVLGSRGGGGSGGGGSGGGSLEMAQVQLVQSGAEVKKPGSSVKVSCKASGGTFSSYAISWVRQAPGQGLEWMGGIIPIFGTANYAQKFQGRVTITADESTSTAYMELSSLRSEDTAVYYCARRIPPYYGMDVWGQGTTVTVSS

SEQ ID NO: 6566 - protein, 250 aa, Artificial Sequence
  source: /note="Description of Artificial Sequence: Synthetic single chain variable fragment"
DIQMTQSPSSLSASVGDRVTITCRASQSISSYLNWYQQKPGKAPKLLIYAASSLQSGVPSRFSGSGSGTDFTLTISSLQPEDFATYYCQQSYSTPLTFGGGTKVDIKRSRGGGGSGGGGSGGGGSLEMAQVQLQQSGPGLVKPSQTLSLTCAISGDSVSSNSAAWNWIRQSPSRGLEWLGRTYYGSKWYNDYAVSVKSRITINPDTSKNQFSLQLNSVTPEDTAVYYCARGRLGDAFDIWGQGTMVTVSS

SEQ ID NO: 6567 - protein, 253 aa, Artificial Sequence
  source: /note="Description of Artificial Sequence: Synthetic single chain variable fragment"
QAVVTQPPSASGTPGQRVTISCSGSSSNIGSNTVNWYQQVPGTAPKLLIYSNNQRPSGVPDRFSGSKSGTSASLAISGLQSEDEADYYCAAWDDSLNGWVFGGGTKLTVLGSRGGGGSGGGGSGGGGSLEMAQMQLVQSGAEVKEPGESLRISCKGSGYSFTNFWISWVRQMPGKGLEWMGRVDPGYSYSTYSPSFQGHVTISADKSTSTAYLQWNSLKASDTAMYYCARVQYSGYYDWFDPWGQGTLVTVSS

SEQ ID NO: 6568 - protein, 246 aa, Artificial Sequence
  source: /note="Description of Artificial Sequence: Synthetic single chain variable fragment"
DIQMTQSPSTLSASVGDRVTITCRASQNINKWLAWYQQRPGKAPQLLIYKASSLESGVPSRFSGSGSGTEYTLTISSLQPDDFATYYCQQYNSYATFGQGTKVEIKRSRGGGGSGGGGSGGGGSLEMAQVQLVQSGAEVKKPGESLKISCKGSGYNFSNKWIGWVRQLPGRGLEWIAIIYPGYSDITYSPSFQGRVTISADTSINTAYLHWHSLKASDTAMYYCVRHTALAGFDYWGLGTLVTVSS

SEQ ID NO: 6569 - protein, 249 aa, Artificial Sequence
  source: /note="Description of Artificial Sequence: Synthetic single chain variable fragment"
QSVVTQPPSVSVAPGKTARITCGRNNIGSKSVHWYQQKPGQAPVLVVYDDSDRPSGIPERFSGSNSGNTATLTISRVEAGDEADYYCQVWDSSSDHVVFGGGTKLTVLGSRGGGGSGGGGSGGSLEMAEVQLVQSGGGVVRPGGSLRLSCAASGFTFDDYGMSWVRQAPGKGLEWVSGINWNGGSTGYADSVRGRFTISRDNAKNSLYLQMNSLRAEDTALYYCARERGYGYHDPHDYWGQGTLVTVSS

SEQ ID NO: 6570 - protein, 258 aa, Artificial Sequence
  source: /note="Description of Artificial Sequence: Synthetic single chain variable fragment"
SRAAQPAMAQVQLQQSGAELVKPGASVKISCKASGYSFTGYFMNWVKQSHGKSLEWIGRIHPYDGDTFYNQNFKDKATLTVDKSSNTAHMELLSLTSEDFAVYYCTRYDGSRAMDYWGQGTTVTVSSGGGGSGGGGSETGGGGSDIELTQSPASLAVSLGQRAIISCKASQSVSFAGTSLMHWYHQKPGQQPKLLIYRASNLEAGVPTRFSGSGSKTDFTLNIHPVEEEDAATYYCQQSREYPYTFGGGTKLEIKRAA

SEQ ID NO: 6571 - protein, 243 aa, Artificial Sequence
  source: /note="Description of Artificial Sequence: Synthetic single chain variable fragment"
QLVESGGGLVQPGRSLRLSCTTSGFTFGDYAMIWARQAPGKGLEWVSSISSSSSYIYYADSVKGRFTISRDNAKNSLYLQMNSLRAEDTAVYYCARERYDFWSGMDVWGKGTTVTVSSGGGGSGGGGSGGSAQSALTQPASVSGSPGQSITISCTGTSSDVGSYNLVSWYQQHPGKAPKLMIYEGSKRPSGVSNRFSGSKSGNAASLTISGLQAEDEADYYCQSYDSSLSVVFGGGTKLTVLG

SEQ ID NO: 6572 - protein, 120 aa, Homo sapiens
WRRKRKEKQSETSPKEFLTIYEDVKDLKTRRNHEQEQTFPGGGSTIYSMIQSQSSAPTSQEPAYTLYSLIQPSRKSGSRKRNHSPSFNSTIYEVIGKSQPKAQNPARLSRKELENFDVYS

SEQ ID NO: 6573 - protein, 49 aa, Homo sapiens
HQRRKYRSNKGESPVEPAEPCRYSCPREEEGSTIPIQEDYRKPEPACSP

SEQ ID NO: 6574 - protein, 111 aa, Homo sapiens
RRHQGKQNELSDTAGREINLVDAHLKSEQTEASTRQNSQVLLSETGIYDNDPDLCFRMQEGSEVYSNPCLEENKPGIVYASLNHSVIGPNSRLARNVKEAPTEYASICVRS

SEQ ID NO: 6575 - protein, 114 aa, Homo sapiens
CCLRRHQGKQNELSDTAGREINLVDAHLKSEQTEASTRQNSQVLLSETGIYDNDPDLCFRMQEGSEVYSNPCLEENKPGIVYASLNHSVIGPNSRLARNVKEAPTEYASICVRS

SEQ ID NO: 6576 - protein, 27 aa, Homo sapiens
FWVLVVVGGVLACYSLLVTVAFIIFWV

SEQ ID NO: 6577 - protein, 42 aa, Homo sapiens
KRGRKKLLYIFKQPFMRPVQTTQEEDGCSCRFPEEEEGGCEL

SEQ ID NO: 6578 - protein, 44 aa, Homo sapiens
FWVRSKRSRLLHSDYMNMTPRRPGPTRKHYQPYAPPRDFAAYRS

SEQ ID NO: 6579 - protein, 41 aa, Homo sapiens
RSKRSRGGHSDYMNMTPRRPGPTRKHYQPYAPPRDFAAYRS

SEQ ID NO: 6580 - protein, 43 aa, Homo sapiens
RSKRSRGGHSDYIVINMTPRRPGPTRKHYQPYAPPRDFAAYRS

SEQ ID NO: 6581 - protein, 220 aa, Homo sapiens
MLRLLLALNLFPSIQVTGNKILVKQSPMLVAYDNAVNLSCKYSYNLFSREFRASLHKGLDSAVEVCVVYGNYSQQLQVYSKTGFNCDGKLGNESVTFYLQNLYVNQTDIYFCKIEVMYPPPYLDNEKSNGTIIHVKGKHLCPSPLFPGPSKPFWVLVVVGGVLACYSLLVTVAFIIFWVRSKRSRLLHSDYMNMTPRRPGPTRKHYQPYAPPRDFAAYRS

SEQ ID NO: 6582 - protein, 187 aa, Homo sapiens
RRACRKRIRQKLHLCYPVQTSQPKLELVDSRPRRSSTQLRSGASVTEPVAEERGLMSQPLMETCHSVGAAYLESLPLQDASPAGGPSSPRDLPEPRVSTEHTNNKIEKIYIMKADTVIVGTVKAELPEGRGLAGPAEPELEEELEADHTPHYPEQETEPPLGSCSDVMLSVEEEGKEDPLPTAASGK

SEQ ID NO: 6583 - protein, 187 aa, Homo sapiens; identical to SEQ ID NO: 6582

SEQ ID NO: 6584 - protein, 54 aa, Homo sapiens
HIWQLRSQCMWPRETQLLLEVPPSTEDARSCQFPEEERGERSAEEKGRLGDLWV

SEQ ID NO: 6585 - protein, 60 aa, Homo sapiens
CVKRRKPRGDVVKVIVSVQRKRQEAEGEATVIEALQAPPDVTTVAVEETIPSFTGRSPNH

SEQ ID NO: 6586 - protein, 35 aa, Homo sapiens
TKKKYSSSVHDPNGEYMFMRAVNTAKKSRLTDVTL

SEQ ID NO: 6587 - protein, 38 aa, Homo sapiens
CWLTKKKYSSSVHDPNGEYMFMRAVNTAKKSRLTDVTL

SEQ ID NO: 6588 - protein, 54 aa, Homo sapiens
HLWRRQWRPRRFSALEQGIHPPQAQSKIEELEQEPEPEPEPEPEPEPEPEPEQL

SEQ ID NO: 6589 - protein, 42 aa, Homo sapiens
ALYLLRRDQRLPPDAHKPPGGGSFRTPIQEEQADAHSTLAKI

SEQ ID NO: 6590 - protein, 37 aa, Homo sapiens
RRDQRLPPDAHKPPGGGSFRTPIQEEQADAHSTLAKI

SEQ ID NO: 6591 - protein, 42 aa, Homo sapiens
KRGRKKLLYIFKQPFMRPVQTIQEEDGCSCRFPEEEEGGCEL

SEQ ID NO: 6592 - protein, 42 aa, Homo sapiens
KRGRKKLLYIFKQPFMRPVQTTQEEDGCSCRFPEEEEGGYEL

SEQ ID NO: 6593 - protein, 225 aa, Homo sapiens
TGTTTPAPRPPTPAPTIASQPLSLRPEACRPAAGGAVHTRGLDFACDIYIWAPLAGTCGVLLLSLVITLYCKRGRKKLLYIFKQPFMRPVQTTQEEDGCSCRFPEEEEGGCELRVKFSRSADAPAYQQGQNQLYNELNLGRREEYDVLDKRRGRDPEMGGKPRRKNPQEGLYNELQKDKMAEAYSEIGMKGERRRGKGHDGLYQGLSTATKDTYDALHMQALPPR

SEQ ID NO: 6594 - protein, 154 aa, Homo sapiens
KRGRKKLLYIFKQPFMRPVQTTQEEDGCSCRFPEEEEGGCELRVKFSRSADAPAYQQGQNQLYNELNLGRREEYDVLDKRRGRDPEMGGKPRRKNPQEGLYNELQKDKMAEAYSEIGMKGERRRGKGHDGLYQGLSTATKDTYDALHMQALPPR

SEQ ID NO: 6595 - protein, 194 aa, Homo sapiens
KRIKPIVWPSLPDHKKTLEHLCKKPRKNLNVSFNPESFLDCQIHRVDDIQARDEVEGFLQDTFPQQLEESEKQRLGGDVQSPNCPSEDVVITPESFGRDSSLTCLAGNVSACDAPILSSSRSLDCRESGKNGPHVYQDLLLSLGTTNSTLPPPFSLQSGILTLNPVAQGQPILTSLGSNQEEAYVTMSSFYQNQ

SEQ ID NO: 6596 - protein, 47 aa, Homo sapiens
RFSVVKRGRKKLLYIFKQPFMRPVQTTQEEDGCSCRFPEEEEGGCEL

SEQ ID NO: 6597 - protein, 341 aa, Homo sapiens
RKKRKDAKNNEVSFSQIKPKKSKLIRVENFEAYFKKQQADSNCGFAEEYEDLKLVGISQPKYAAELAENRGKNRYNNVLPYDISRVKLSVQTHSTDDYINANYMPGYHSKKDFIATQGPLPNTLKDFWRMVWEKNVYAIIMLTKCVEQGRTKCEEYWPSKQAQDYGDITVAMTSEIVLPEWTIRDFTVKNIQTSESHPLRQFHFTSWPDHGVPDTTDLLINFRYLVRDYMKQSPPESPILVHCSAGVGRTGTFIAIDRLIYQIENENTVDVYGIVYDLRMHRPLMVQTEDQYVFLNQCVLDIVRSQKDSKVDLIYQNTTAMTIYENLAPVTTFGKTNGYIA

SEQ ID NO: 6598 - protein, 48 aa, Homo sapiens
QRRKYRSNKGESPVEPAEPCHYSCPREEEGSTIPIQEDYRKPEPACSP

SEQ ID NO: 6599 - protein, 6 aa, Homo sapiens
FAAYRS

SEQ ID NO: 6600 - protein, 68 aa, Homo sapiens; identical to SEQ ID NO: 5966

SEQ ID NO: 6601 - protein, 41 aa, Homo sapiens
RSKRSRLLHSDYMNMTPRRPGPTRKHYQPYAPPRDFAAYRS

SEQ ID NO: 6602 - protein, 40 aa, Homo sapiens
SKRSRLLHSDYMNMTPRRPGPTRKHYQPYAPPRDFAAYRS

SEQ ID NO: 6603 - protein, 106 aa, Homo sapiens
IEVMYPPPYLDNEKSNGTIIHVKGKHLCPSPLFPGPSKPFWVLVVVGGVLACYSLLVTVAFIIFWRSKRSRLLHSDYMNMTPRRPGPTRKHYQPYAPPRDFAAYRS

SEQ ID NO: 6604 - protein, 200 aa, Homo sapiens
RSKRSRLLHSDYMNMTPRRPGPTRKHYQPYAPPRDFAAYRSRFSVVKRGRKKLLYIFKQPFMRPVQTTQEEDGCSCRFPEEEEGGCELRVKFSRSADAPAYQQGQNQLYNELNLGRREEYDVLDKRRGRDPEMGGKPRRKNPQEGLYNELQKDKMAEAYSEIGMKGERRRGKGHDGLYQGLSTATKDTYDALHMQALPPR

SEQ ID NO: 6605 - protein, 222 aa, Homo sapiens
AAAIEVMYPPPYLDNEKSNGTIIHVKGKHLCPSPLFPGPSKPFWVLVVVGGVLACYSLLVTVAFIIFWVRSKRSRLLHSDYMNMTPRRPGPTRKHYQPYAPPRDFAAYRSRVKFSRSADAPAYQQGQNQLYNELNLGRREEYDVLDKRRGRDPEMGGKPRRKNPQEGLYNELQKDKMAEAYSEIGMKGERRRGKGHDGLYQGLSTATKDTYDALHMQALPPR

SEQ ID NO: 6606 - protein, 188 aa, Homo sapiens
RSKRSRLLHSDYNMTPRRPGPTRKHYQPYAPPRDFAAYRSRDQRLPPDAHKPPGGGSFRTPIQEEQADAHSTLAKIRVKFSRSADAPAYQQGQNQLYNELNLGRREEYDVLDKRRGRDPEMGGKPRRKNPQEGLYNELQKDKMAEAYSEIGMKGERRRGKGHDGLYQGLSTATKDTYDALHMQALPPR

SEQ ID NO: 6607 - protein, 70 aa, Homo sapiens
MFWVLVVVGGVLACYSLLVTVAFIIFWVKRGRKKLLYIFKQPFMRPVQTTQEEDGCSCRFPEEEEGGCEL

SEQ ID NO: 6608 - protein, 108 aa, Homo sapiens
IEVMYPPPYLDNEKSNGTIIHVKGKHLCPSPLFPGPSKPFWVLVVVGGVLACYSLLVTVAFIIFWVKRGRKKLLYIFKQPFMRPVQTTQEEDGCSCRFPEEEEGGCEL

SEQ ID NO: 6609 - protein, 153 aa, Homo sapiens
RSKRSRLLHSDYMNMTPRRPGPTRKHYQPYAPPRDFAAYRSRVKFSRSADAPAYQQGQNQLYNELNLGRREEYDVLDKRRGRDPEMGGKPRRKNPQEGLYNELQKDKMAEAYSEIGMKGERRRGKGHDGLYQGLSTATKDTYDALHMQALPPR

SEQ ID NO: 6610 - protein, 151 aa, Homo sapiens
KRSRLLHSDYMNMTPRRPGPTRKHYQPYAPPRDFAAYRSRVKFSRSADAPAYQQGQNQLYNELNLGRREEYDVLDKRRGRDPEMGGKPRRKNPQEGLYNELQKDKMAEAYSEIGMKGERRRGKGHDGLYQGLSTATKDTYDALHMQALPPR

SEQ ID NO: 6611 - protein, 171 aa, Homo sapiens
MEHSTFLSGLVLATLLSQVSPFKIPIEELEDRVFVNCNTSITWVEGTVGTLLSDITRLDLGKRILDPRGIYRCNGTDIYKDKESTVQVHYRMCQSCVELDPATVAGIIVTDVIATLLLALGVFCFAGHETGRLSGAADTQALLRNDQVYQPLRDRDDAQYSHLGGNWARNK

SEQ ID NO: 6612 - protein, 127 aa, Homo sapiens
MEHSTFLSGLVLATLLSQVSPFKIPIEELEDRVFVNCNTSITWVEGTVGTLLSDITRLDLGKRILDPRGIYRCNGTDIYKDKESTVQVHYRTADTQALLRNDQVYQPLRDRDDAQYSHLGGNWARNK

SEQ ID NO: 6613 - protein, 21 aa, Homo sapiens
DQVYQPLRDRDDAQYSHLGGN

SEQ ID NO: 6614 - protein, 171 aa, Homo sapiens; identical to SEQ ID NO: 6611

SEQ ID NO: 6615 - protein, 127 aa, Homo sapiens; identical to SEQ ID NO: 6612

SEQ ID NO: 6616 - protein, 21 aa, Homo sapiens
DQVYQPLRDRDDAQYSHLGGN

SEQ ID NO: 6617 - protein, 207 aa, Homo sapiens
MQSGTHWRVLGLCLLSVGVWGQDGNEEMGGITQTPYKVSISGTTVILTCPQYPGSEILWQHNDKNIGGDEDDKNIGSDEDHLSLKEFSELEQSGYYVCYPRGSKPEDANFYLYLRARVCENCMEMDVMSVATIVIVDICITGGLLLLVYYWSKNRKAKAKPVTRGAGAGGRQRGQNKERPPPVPNPDYEPIRKGQRDLYSGLNQRRI

SEQ ID NO: 6618 - protein, 21 aa, Homo sapiens
NPDYEPIRKGQRDLYSGLNQR

SEQ ID NO: 6619 - protein, 182 aa, Homo sapiens
MEQGKGLAVLILAIILLQGTLAQSIKGNHLVKVYDYQEDGSVLLTCDAEAKNITWFKDGKMIGFLTEDKKKWNLGSNAKDPRGMYQCKGSQNKSKPLQVYYRMCQNCIELNAATISGFLFAEIVSIFVLAVGVYFIAGQDGVRQSRASDKQTLLPNDQLYQPLKDREDDQYSHLQGNQLRRN

SEQ ID NO: 6620 - protein, 21 aa, Homo sapiens
DQLYQPLKDREDDQYSHLQGN

SEQ ID NO: 6621 - protein, 21 aa, Homo sapiens
DQLYQPLKDREDDQYSHLQGN

SEQ ID NO: 6622 - protein, 182 aa, Homo sapiens; identical to SEQ ID NO: 6619

SEQ ID NO: 6623 - protein, 163 aa, Homo sapiens
MKWKALFTAAILQAQLPITEAQSFGLLDPKLCYLLDGILFIYGVILTALFLRVKFSRSADAPAYQQGQNQLYNELNLGRREEYDVLDKRRGRDPEMGGKPRRKNPQEGLYNELQKDKMAEAYSEIGMKGERRRGKGHDGLYQGLSTATKDTYDALHMQALPPR

SEQ ID NO: 6624 - protein, 164 aa, Homo sapiens
MKWKALFTAAILQAQLPITEAQSFGLLDPKLCYLLDGILFIYGVILTALFLRVKFSRSADAPAYQQGQNQLYNELNLGRREEYDVLDKRRGRDPEMGGKPQRRKNPQEGLYNELQKDKMAEAYSEIGMKGERRRGKGHDGLYQGLSTATKDTYDALHMQALPPR

SEQ ID NO: 6625 - protein, 164 aa, Homo sapiens; identical to SEQ ID NO: 6624

SEQ ID NO: 6626 - protein, 21 aa, Homo sapiens
NQLYNELNLGRREEYDVLDKR

SEQ ID NO: 6627 - protein, 112 aa, Homo sapiens
RVKFSRSADAPAYQQGQNQLYNELNLGRREEYDVLDKRRGRDPEMGGKPRRKNPQEGLYNELQKDKMAEAYSEIGMKGERRRGKGHDGLYQGLSTATKDTYDALHMQALPPR

SEQ ID NO: 6628 - protein, 21 aa, Homo sapiens
DGLYQGLSTATKDTYDALHMQ

SEQ ID NO: 6629 - protein, 112 aa, Homo sapiens
RVKFSRSAEPPAYQQGQNQLYNELNLGRREEYDVLDKRRGRDPEMGGKPRRKNPQEGLYNELQKDKMAEAYSEIGMKGERRRGKGHDGLYQGLSTATKDTYDALHMQALPPR

SEQ ID NO: 6630 - protein, 113 aa, Homo sapiens
RVKFSRSADAPAYQQGQNQLYNELNLGRREEYDVLDKRRGRDPEMGGKPQRRKNPQEGLYNELQKDKMAEAYSEIGMKGERRRGKGHDGLYQGLSTATKDTYDALHMQALPPR

SEQ ID NO: 6631 - protein, 114 aa, Homo sapiens
RSRVKFSRSADAPAYQQGQNQLYNELNLGRREEYDVLDKRRGRDPEMGGKPRRKNPQEGLYNELQKDKMAEAYSEIGMKGERRRGKGHDGLYQGLSTATKDTYDALHMQALPPR

SEQ ID NO: 6632 - protein, 98 aa, Homo sapiens
RVKFSRSADAPAYQQGEYDVLDKRRGRDPEMGGKPRRKNPQEGLYNELQKDKMAEAYSEIGMKGERRRGKGHDGLYQGLSTATKDTYDALHMQALPPR

SEQ ID NO: 6633 - protein, 112 aa, Homo sapiens
RVKFSRSADAPAYQQGQNQLYNELNLGRREEVDVLDKRRGRDPEMGGKPRRKNPQEGLYNELQKDKMAEAYSEIGMKGERRRGKGHDGLYQGLSTATKDTYDALHMQALPPR

SEQ ID NO: 6634 - protein, 173 aa, Homo sapiens
MIPAVVLLLLLLVEQAAALGEPQLCYILDAILFLVGIVLTLLVCRLKIQVRKAAITSYEKSRVKFSRSADAPAYQQGQNQLYNELNLGRREEYDVLDKRRGRDPEMGGKPRRKNPQEGLYNELQKDKMAEAVSEIGMKGERRRGKGHDGLYQGLSTATKDTYDALHMQALPPR

SEQ ID NO: 6635 - protein, 113 aa, Homo sapiens
LRVKFSRSADAPAYQQGQNQLYNELNLGRREEYDVLDKRRGRDPEMGGKPRRKNPQEGLYNELQKDKMAEAYSEIGMKGERRRGKGHDGLYQGLSTATKDTYDALHMQALPPR

SEQ ID NO: 6636 - protein, 60 aa, Homo sapiens
RVKFSRSADAPAYQQGQNQLYNELNLGRREEYDVLDKRRGRDPEMGGKPQRRKNPQEGLY

SEQ ID NO: 6637 - protein, 114 aa, Homo sapiens
LRVKFSRSADAPAYQQGQNQLYNELNLGRREEYDVLDKRRGRDPEMGGKPQRRKNPQEGLYNELQKDKMAEAYSEIGMKGERRRGKGHDGLYQGLSTATKDTYDALHMQALPPR

SEQ ID NO: 6638 - protein, 113 aa, Homo sapiens
RRVKFSRSADAPAYQQGQNQLYNELNLGRREEYDVLDKRRGRDPEMGGKPRRKNPQEGLYNELQKDKMAEAYSEIGMKGERRRGKGHDGLYQGLSTATKDTYDALHMQALPPR

SEQ ID NO: 6639 - protein, 21 aa, Homo sapiens
NQLYNELNLGRREEYDVLDKR

SEQ ID NO: 6640 - protein, 22 aa, Homo sapiens
EGLYNELQKDKMAEAYSEIGMK

SEQ ID NO: 6641 - protein, 21 aa, Homo sapiens
DGLYQGLSTATKDTYDALHMQ

SEQ ID NO: 6642 - protein, 112 aa, Homo sapiens; identical to SEQ ID NO: 6627

SEQ ID NO: 6643 - protein, 112 aa, Homo sapiens
RVKFSRSADAPAYKQGQNQLYNELNLGRREEYDVLDKRRGRDPEMGGKPRRKNPQEGLYNELQKDKMAEAYSEIGMKGERRRGKGHDGLYQGLSTATKDTYDALHMQALPPR

SEQ ID NO: 6644 - protein, 110 aa, Homo sapiens
RVKFSRSADAPAYQQGQNQLYNELNLGRREEYDVLDKRRGRDPEMGGKPRRKNPQEGLYNELQKDKMAEAYSEIGMKGERRRGKGHDGLYQGLSTATKDTYDALHMQALP

SEQ ID NO: 6645 - protein, 137 aa, Homo sapiens
DPKLCYLLDGILFIYGVILTALFLRVKFSRSADAPAYQQGQNQLYNELNLGRREEYDVLDKRRGRDPEMGGKPQRRKNPQEGLYNELQKDKMAEAYSEIGMKGERRRGKGHDGLYQGLSTATKDTYDALHMQALPPR

SEQ ID NO: 6646 - protein, 163 aa, Homo sapiens; identical to SEQ ID NO: 6623

SEQ ID NO: 6647 - protein, 38 aa, Homo sapiens
RSRDQRLPPDAHKPPGGGSFRTPIQEEQADAHSTLAKI

SEQ ID NO: 6648 - protein, 226 aa, Homo sapiens
MPGGPGVLQALPATIFLLFLLSAVYLGPGCQALWMHKVPASLMVSLGEDAHFQCPHNSSNNANVTWWRVLHGNYTWPPEFLGPGEDPNGTLIIQNVNKSHGGIYVCRVQEGNESYQQSCGTYLRVRQPPPRPFLDMGEGTKNRIITAEGIILLFCAVVPGTLLLFRKRWQNEKLGLDAGDEYEDENLYEGLNLDDCSMYEDISRGLQGTYQDVGSLNIGDVQLEKP

SEQ ID NO: 6649 - protein, 188 aa, Homo sapiens
MPGGPGVLQALPATIFLLFLLSAVYLGPGCQALWMHKVPASLMVSLGEDAHFQCPHNSSNNANVTWWRVLHGNYTWPPEFLGPGEDPNEPPPRPFLDMGEGTKNRIITAEGIILLFCAVVPGTLLLFRKRWQNEKLGLDAGDEYEDENLYEGLNLDDCSMYEDISRGLQGTYQDVGSLNIGDVQLEKP

SEQ ID NO: 6650 - protein, 226 aa, Homo sapiens; identical to SEQ ID NO: 6648

SEQ ID NO: 6651 - protein, 21 aa, Homo sapiens
ENLYEGLNLDDCSMYEDISRG

SEQ ID NO: 6652 - protein, 84 aa, Homo sapiens
FVPVFLPAKPTTTPAPRPPTPAPTIASQPLSLRPEACRPAAGGAVHTRGLDFACDIYIWAPLAGTCGVLLLSLVITLYCNHRNR

SEQ ID NO: 6653 - protein, 84 aa, Homo sapiens
FVPVFLPAKPITTPAPRPPTPAPTIASQPLSLRPEACRPAAGGAVHTRGLDFACDIYIWAPLAGTCGVLLLSLVITLYCNHRNR

SEQ ID NO: 6654 - protein, 47 aa, Homo sapiens
PTTTPAPRPPTPAPTIASQPLSLRPEACRPAAGGAVHTRGLDFACDI

SEQ ID NO: 6655 - protein, 41 aa, Homo sapiens
AVSLSKMLKKRSPLTTGVFVKMAPTEAECEKQFQPYFIPIN

SEQ ID NO: 6656 - protein, 47 aa, Homo sapiens
AVSLSKMLKKRSPLTTGVYMNMTPRRPECEKQFQPYAPPRDFAAYRS

SEQ ID NO: 6657 - protein, 20 aa, Homo sapiens
RPRRSPAQDGKVYINMPGRG

SEQ ID NO: 6658 - protein, 113 aa, Homo sapiens
MGGLEPCSRLLLLPLLLAVSGLRPVQAQAQSDCSCSTVSPGVLAGIVMGDLVLTVLIALAVYFLGRLVPRGRGAAEAATRKQRITETESPYQELQGQRSDVYSDLNTQRPYYK

SEQ ID NO: 6659 - protein, 112 aa, Homo sapiens
MGGLEPCSRLLLLPLLLAVSGLRPVQAQAQSDCSCSTVSPGVLAGIVMGDLVLTVLIALAVYFLGRLVPRGRGAAEATRKQRITETESPYQELQGQRSDVYSDLNTQRPYYK

SEQ ID NO: 6660 - protein, 102 aa, Homo sapiens
MGGLEPCSRLLLLPLLLAVSDCSCSTVSPGVLAGIVMGDLVLTVLIALAVYFLGRLVPRGRGAAEAATRKQRITETESPYQELQGQRSDVYSDLNTQRPYYK

SEQ ID NO: 6661 - protein, 101 aa, Homo sapiens
MGGLEPCSRLLLLPLLLAVSDCSCSTVSPGVLAGIVMGDLVLTVLIALAVYFLGRLVPRGRGAAEATRKQRITETESPYQELQGQRSDVYSDLNTQRPYYK

SEQ ID NO: 6662 - protein, 113 aa, Homo sapiens; identical to SEQ ID NO: 6658

SEQ ID NO: 6663 - protein, 112 aa, Homo sapiens; identical to SEQ ID NO: 6659

SEQ ID NO: 6664 - protein, 102 aa, Homo sapiens; identical to SEQ ID NO: 6660

SEQ ID NO: 6665 - protein, 101 aa, Homo sapiens; identical to SEQ ID NO: 6661

SEQ ID NO: 6666 - protein, 21 aa, Homo sapiens
ESPYQELQGQRSDVYSDLNTQ

SEQ ID NO: 6667 - protein, 21 aa, Homo sapiens
ESPYQELQGQRSDVYSDLNTQ

SEQ ID NO: 6668 - protein, 49 aa, Homo sapiens
RSQCMWPRETQLLLEVPPSTEDARSCQFPEEERGERSAEEKGRLGDLWV

SEQ ID NO: 6669 - protein, 35 aa, Homo sapiens
TKKKYSSSVHDPNGEFMFMRAVNTAKKSRLTDVTL

SEQ ID NO: 6670 - protein, 39 aa, Homo sapiens
KSRQTPPLASVEMEAMEALPVTWGTSSRDEDLENCSHHL

SEQ ID NO: 6671 - protein, 149 aa, Homo sapiens
RRDQRLPPDAHKPPGGGSFRTPIQEEQADAHSTLAKIRVKFSRSADAPAYQQGQNQLYNELNLGRREEYDVLDKRRGRDPEMGGKPRRKNPQEGLYNELQKDKMAEAYSEIGMKGERRRGKGHDGLYQGLSTATKDTYDALHMQALPPR

SEQ ID NO: 6672 - protein, 619 aa, Homo sapiens
MPDPAAHLPFFYGSISRAEAEEHLKLAGMADGLFLLRQCLRSLGGYVLSLVHDVRFHHFPIERQLNGTYAIAGGKAHCGPAELCEFYSRDPDGLPCNLRKPCNRPSGLEPQPGVFDCLRDAMVRDYVRQTWKLEGEALEQAIISQAPQVEKLIATTAHERMPWYHSSLTREEAERKLYSGAQTDGKFLLRPRKEQGTYALSLIYGKTVYHYLISQDKAGKYCIPEGTKFDTLWQLVEYLKLKADGLIYCLKEACPNSSASNASGAAAPTLPAHPSTLTHPQRRIDTLNSDGYTPEPARITSPDKPRPMPMDTSVYESPYSDPEELKDKKLFLKRDNLLIADIELGCGNFGSVRQGVYRMRKKQIDVAIKVLKQGTEKADTEEMMREAQIMHQLDNPYIVRLIGVCQAEALMLVMEMAGGGPLHKFLVGKREEIPVSNVAELLHQVSMGMKYLEEKNFVHRDLAARNVLLVNRHYAKISDFGLSKALGADDSYYTARSAGKWPLKWYAPECINFRKFSSRSDVWSYGVTMWEALSYGQKPYKKMKGPEVMAFIEQGKRMECPPECPPELYALMSDCWIYKWEDRPDFLTVEQRMRACYYSLASKVEGPPGSTQKAEAACA

SEQ ID NO: 6673 - protein, 180 aa, Homo sapiens
MLRLLLALNLFPSIQVTGNKILVKQSPMLVAYDNAVNLSCKYSYNLFSREFRASLHKGLDSAVEVCVVYGNYSQQLQVYSKTGFNCDGKLGNESVTFYLQNLYVNQTDIYFCKIEVMYPPPYLDNEKSNGTIIHVKGKHLCPSPLFPGPSKPFWVLVVVGGVLACYSLLVTVAFIIFWVR

SEQ ID NO: 6674 - protein, 240 aa, Homo sapiens
MGNSCYNIVATLLLVLNFERTRSLQDPCSNCPAGTFCDNNRNQICSPCPPNSFSSAGGQRTCDICRQCKGVFRTRKECSSTSNAECDCTPGFHCLGAGCSMCEQDCKQGQELTKKGCKDCCFGTFNDQKRGICRPWTNCSLDGKSVLVNGTKERDVVCGPSPADLSPGASSVTPPAPAREPGHSPQIISFFLALTSTALLFLLFFLTLRFSVVKRGRKKLLYIFKQPFMRPVQTTQEEDG

SEQ ID NO: 6675 - protein, 86 aa, Homo sapiens
MIPAVVLLLLLLVEQAAALGEPQLCYILDAILFLYGIVLTLLYCRLKIQVRKAAITSYEKSDGVYTGLSTRNQETYETLKHEKPPQ

SEQ ID NO: 6676 - protein, 21 aa, Homo sapiens
DGVYTGLSTRNQETYETLKHE

SEQ ID NO: 6677 - protein, 66 aa, Homo sapiens
DPKLCYILDAILFLYGIVLTLLYCRLKIQVRKAAITSYEKSDGVYTGLSTRNQETYETLKHEKPPQ

SEQ ID NO: 6678 - protein, 21 aa, Homo sapiens
DGVYTGLSTRNQETYETLKHE

SEQ ID NO: 6679 - protein, 46 aa, Homo sapiens
TTTPAPRPPTPAPTIASQPLSLRPEACRPAAGGAVHTRGLDFACDI

SEQ ID NO: 6680 - protein, 31 aa, Homo sapiens
IISFFLALTSTALLFLLFFLTLRFSVVKRGR

SEQ ID NO: 6681 - protein, 27 aa, Homo sapiens
IISFFLALTSTALLFLLFFLTLRFSVV

SEQ ID NO: 6682 - protein, 26 aa, Homo sapiens
VAAILGLGLVLGLLGPLAILLALYLL

SEQ ID NO: 6683 - protein, 363 aa, Homo sapiens
AVFGCIFGALVIVTVGGFIFWRKKRKDAKNNEVSFSQIKPKKSKLIRVENFEAYFKKQQADSNCGFAEEYEDLKLVGISQPKYAAELAENRGKNRYNNVLPYDISRVKLSVQTHSTDDYINANYMPGYHSKKDFIATQGPLPNTLKDFWRMVWEKNVYAIIMLTKCVEQGRTKCEEYWPSKQAQDYGDITVAMTSEIVLPEVVTIRDFTVKNIQTSESHPLRQFHFTSWPDHGVPDTTDLLINFRYLVRDYMKQSPPESPILVHCSAGVGRTGTFIAIDRLIYQIENENTVDVYGIVYDLRMHRPLMVQTEDQYVFLNQCVLDIVRSQKDSKVDLIYQNTTAMTIYENLAPVTTFGKTNGYIA

SEQ ID NO: 6684 - protein, 21 aa, Homo sapiens
AVFGCIFGALVIVTVGGFIFW

SEQ ID NO: 6685 - protein, 185 aa, Homo sapiens
KEITNALETWGALGQDINLDIPSFQMSDDIDDIKWEKTSDKKKIAQFRKEKETFKEKDTYKLFKNGTLKIKHLKTDDQDIYKVSIYDTKGKNVLEKIFDLKIQERVSKPKISWTCINTTLTCEVMNGTDPELNLYQDGKHLKLSQRVITHKWTTSLSAKFKCTAGNKVSKESSVEPVSCPEKGLD

SEQ ID NO: 6686 - protein, 106 aa, Homo sapiens
IEVMYPPPYLDNEKSNGTITHVKGKHLCPSPLFPGPSKPFWVLVVVGGVLACYSLLVTVAHIFWVRSKRSRLLHSDYMNMTPRRPGPTRKHYQPYAPPRDFAAYRS

SEQ ID NO: 6687 - protein, 27 aa, Homo sapiens
FWVLVVVGGVLACYSLLVTVAFIIFWV

SEQ ID NO: 6688 - protein, 66 aa, Homo sapiens
IEVMYPPPYLDNEKSNGTIIHVKGKHLCPSPLFPGPSKPFWVLVVVGGVLACYSLLVTVAFIIFWV

SEQ ID NO: 6689 - protein, 33 aa, Homo sapiens
IFWVLVVVGGVLACYSLLVTVAFIIFWVRSKRR

SEQ ID NO: 6690 - protein, 68 aa, Homo sapiens; identical to SEQ ID NO: 5966

SEQ ID NO: 6691 - protein, 28 aa, Homo sapiens
MFWVLVVVGGVLACYSLLVTVAFIIFWV

SEQ ID NO: 6692 - protein, 26 aa, Homo sapiens
FWVLVVVGGVLACYSLLVTVAFHFWV

SEQ ID NO: 6693 - protein, 28 aa, Homo sapiens
MFWVLVVVGGVLACYSGGVTVAFIIFWV

SEQ ID NO: 6694 - protein, 26 aa, Homo sapiens
WVLVVVGGVLACYSLLVTVAFIIFWV

SEQ ID NO: 6695 - protein, 69 aa, Homo sapiens
PFWVLVVVGGVLACYSLLVTVAFIIFWVRSKRSRLLHSDYMNMTPRRPGPTRKHYQPYAPPRDFAAYRS

SEQ ID NO: 6696 - protein, 180 aa, Homo sapiens
FWVLVVVGGVLACYSLLVTVAFIIFWVRSKRSRLLHSDYMNMTPRRPGPTRKHYQPYAPPRDFAAYRSRVKFSRSADAPAYQQGQNQLYNELNLGRREEYDVLDKRRGRDPEMGGKPRRKNPQEGLYNELQKDKMAEAYSEIGMKGERRRGKGHDGLYQGLSTATKDTYDALHMQALPPR

SEQ ID NO: 6697 - protein, 216 aa, Homo sapiens
FWVLVVVGGVLACYSLLVTVAFIIFWVRSKRSRLLHSDYMNMTPRRPGPTRKHYQPYAPPRDFAAYRSRDQRLPPDAHKPPGGGSFRTPIQEEQADAHSTLAKIRVKFSRSADAPAYQQGQNQLYNELNLGRREEYDVLDKRRGRDPEMGGKPRRKNPQEGLYNELQKDKMAEAYSEIGMKGERRRGKGHDGLYQGLSTATKDTYDALHMQALPPR

SEQ ID NO: 6698 - protein, 140 aa, Homo sapiens
FWVLVVVGGVLACYSLLVTVAFIIFWVRRVKFSRSADAPAYQQGQNQLYNELNLGRREEYDVLDKRRGRDPEMGGKPRRKNPQEGLYNELQKDKMAEAYSEIGMKGERRRGKGHDGLYQGLSTATKDTYDALHMQALPPR

SEQ ID NO: 6699 - protein, 222 aa, Homo sapiens; identical to SEQ ID NO: 6605

SEQ ID NO: 6700 - protein, 23 aa, Homo sapiens
LCYLLDGILFIYGVILTALFLRV

SEQ ID NO: 6701 - protein, 51 aa, Homo sapiens
MKWKALFTAAILQAQLPITEAQSFGLLDPKLCYLLDGILFIYGVILTALFL

SEQ ID NO: 6702 - protein, 21 aa, Homo sapiens
LCYLLDGILFIYGVILTALFL

SEQ ID NO: 6703 - protein, 25 aa, Homo sapiens
ALIVLGGVAGLLLFIGLGIFFCVRC

SEQ ID NO: 6704 - protein, 22 aa, Homo sapiens
MALIVLGGVAGLLLFIGLGIFF

SEQ ID NO: 6705 - protein, 725 aa, Homo sapiens
ALIAFLAFLIIVTSIALLVVLYKIYDLHKKRSCNLDEQQELVERDDEKQLMNVEPIHADILLETYKRKIADEGRLFLAEFQSIPRVFSKFPIKEARKPFNQNKNRYVDILPYDYNRVELSEINGDAGSNYINASYIDGFKEPRKYIAAQGPRDETVDDFWRMIWEQKATVIVMVTRCEEGNRNKCAEYWPSMEEGTRAFGDVVVKINQHKRCPDYIIQKLNIVNKKEKATGREVTHIQFTSWPDHGVPEDPHLLLKLRRRVNAFSNFFSGPIWHCSAGVGRTGTYIGIDAMLEGLEAENKVDVYGYVVKLRRQRCLMVQVEAQYILIHQALVEYNQFGETEVNLSELHPYLHNMKKRDPPSEPSPLEAEFQRLPSYRSWRTQHIGNQEENKSKNRNSNVIPYDYNRVPLKHELEMSKESEHDSDESSDDDSDSEEPSKYINASFIMSYWKPEVMIAAQGPLKETIGDFWQMIFQRKVKVIVMLTELKHGDQEICAQYWGEGKQTYGDIEVDLKDTDKSSTYTLRVFELRHSKRKDSRTVYQYQYTNWSVEQLPAEPKELISMIQWKQKLPQKNSSEGNKHHKSTPLLIHCRDGSQQTGIFCALLNLLESAETEEWDIFQWKALRKARPGMVSTFEQYQFLYDVIASTYPAQNGQVKKNNHQEDKIEFDNEVDKVKQDANCVNPLGAPEKLPEAKEQAEGSEPTSGTEGPEHSVNGPASPALNQGS

SEQ ID NO: 6706 - protein, 23 aa, Homo sapiens
PLFIPVAVMVTAFSGLAFIIWLA

SEQ ID NO: 6707 - protein, 24 aa, Homo sapiens
ALPAALAVISFLLGLGLGVACVLA

SEQ ID NO: 6708 - protein, 21 aa, Homo sapiens
MALPVTALLLPLALLLHAARP

SEQ ID NO: 6709 - protein, 286 aa, Homo sapiens
AAAFVPVFLPAKPTTTPAPRPPTPAPTIASQPLSLRPEACRPAAGGAVHTRGLDFACDIYIWAPLAGTCGVLLLSLVITLYCNHRNRSKRSRLLHSDYMNMTPRRPGPTRKHYQPYAPPRDFAAYRSRFSVVKRGRKKLLYIFKQPFMRPVQTTQEEDGCSCRFPEEEEGGCELRVKFSRSADAPAYQQGQNQLYNELNLGRREEYDVLDKRRGRDPEMGGKPRRKNPQEGLYNELQKDKMAEAYSEIGMKGERRRGKGHDGLYQGLSTATKDTYDALHMQALPPR

SEQ ID NO: 6710 - protein, 226 aa, Homo sapiens
AAATTTPAPRPPTPAPTIASQPLSLRPEACRPAAGGAVHTRGLDFACDIYIWAPLAGTCGVLLLSLVITLYCKRGRKKLLYIFKQPFMRPVQTTQEEDGCSCRFPEEEEGGCELRVKFSRSADAPAYKQGQNQLYNELNLGRREEYDVLDKRRGRDPEMGGKPRRKNPQEGLYNELQKDKMAEAYSEIGMKGERRRGKGHDGLYQGLSTATKDTYDALHMQALPPR

SEQ ID NO: 6711 - protein, 83 aa, Homo sapiens
FVPVFLPAKPTTTPAPRPPTPAPTIASQPLSLRPEACRPAAGGAVHTRGLDFACDIYIWAPLAGTCGVLLLSLVITLYCNHRN

SEQ ID NO: 6712 - protein, 22 aa, Homo sapiens
IWAPLAGTCGVLLLSLVITLYC

SEQ ID NO: 6713 - protein, 24 aa, Homo sapiens
IYIWAPLAGTCGVLLLSLVITLYC

SEQ ID NO: 6714 - protein, 25 aa, Homo sapiens
IYIWAPLAGTCGVLLLSLVITLYCR

SEQ ID NO: 6715 - protein, 25 aa, Homo sapiens
IYIWAPLAGTCGVLLLSLVITLVCR

SEQ ID NO: 6716 - protein, 21 aa, Homo sapiens
IYIWAPLAGTCGVLLLSLVIT

SEQ ID NO: 6717 - protein, 23 aa, Homo sapiens
IYIWAPLAGTCGVLLLSLVITLY

SEQ ID NO: 6718 - protein, 23 aa, Homo sapiens
LGLLVAGVLVLLVSLGVAIHLCC

SEQ ID NO: 6719 - protein, 101 aa, Homo sapiens
APVGLVARLADESGHVVLRWLPPPETPMTSHIRYEVDVSAGNGAGSVQRVEILEGRTECVLSNLRGRTRYTFAVRARMAEPSFGGFWSAWSEPVSLLTPSD

SEQ ID NO: 6720 - protein, 257 aa, Homo sapiens
MAPAMESPTLLCVALLFFAPDGVLAVPQKPKVSLNPPWNRIFKGENVTLTCNGNNFFEVSSTKWFHNGSLSEETNSSLNIVNAKFEDSGEYKCQHQQVNESEPVYLEVFSDWLLLQASAEVVMEGQPLFLRCHGWRNWDVYKVIYYKDGEALKYWYENHNISITNATVEDSGTYYCTGKVWQLDYESEPLNITVIKAPREKYWLQFFIPLLVVILFAVDTGLFISTQQQVTFLLKIKRTRKGFRLLNPHPKPNPKNN

SEQ ID NO: 6721 - protein, 54 aa, Homo sapiens
DIFIPLLVVILFAVDTGLFISTQQQVTFLLKIKRTRKGFRLLNPHPKPNPKNNR

SEQ ID NO: 6722 - protein, 31 aa, Homo sapiens
PLGWLTVVLLAVAACVLLLTSAQLGLHIWQL

SEQ ID NO: 6723 - protein, 24 aa, Homo sapiens
SIISAVVGILLVVVLGVVFGILII

SEQ ID NO: 6724 - protein, 113 aa, Homo sapiens
CHPECQPQNGSVTCFGPEADQCVACAHYKDPPFCVARCPSGVKPDLSYMPIWKFPDEEGACQPCPINCTHSCVDLDDKGCPAEQRASPLTSIISAVVGILLVVVLGVVFGILI

SEQ ID NO: 6725 - protein, 21 aa, Homo sapiens
FWLPIGCAAFVVVCILGCILI

SEQ ID NO: 6726 - protein, 233 aa, Homo sapiens
EPKSPDKTHTCPPCPAPPVAGPSVFLFPPKPKDTLMIARTPEVTCVVVDVSHEDPEVKFNWYVDGVEVHNAKTKPREEQYNSTYRVVSVLTVLHQDWLNGKEYKCKVSNKALPAPIEKTISKAKGQPREPQVYTLPPSRDELTKNQVSLTCLVKGFYPSDIAVEWESNGQPENNYKTTPPVLDSDGSFFLYSKLTVDKSRWQQGNVFSCSVMHEALHNHYTQKSLSLSPGKKD

SEQ ID NO: 6727 - protein, 21 aa, Homo sapiens
VAAILGLGLVLGLLGPLAILL

SEQ ID NO: 6728 - protein, 24 aa, Homo sapiens
IYIWAPLAGTCGVLLLSLVITLYC

SEQ ID NO: 6729 - protein, 24 aa, Homo sapiens
IYIWAPLAGTCGVLLLSLVITLYC

SEQ ID NO: 6730 - protein, 5 aa, Homo sapiens
DKTHT

SEQ ID NO: 6731 - protein, 4 aa, Homo sapiens
CPPC

SEQ ID NO: 6732 - protein, 15 aa, Homo sapiens
CPEPKSCDTPPPCPR

SEQ ID NO: 6733 - protein, 12 aa, Homo sapiens
ELKTPLGDTTHT

SEQ ID NO: 6734 - protein, 10 aa, Homo sapiens
KSCDKTHTCP

SEQ ID NO: 6735 - protein, 7 aa, Homo sapiens
KCCVDCP

SEQ ID NO: 6736 - protein, 7 aa, Homo sapiens
KYGPPCP

SEQ ID NO: 6737 - protein, 16 aa, Homo sapiens
VEPKSPDKTHTCPPCP

SEQ ID NO: 6738 - protein, 16 aa, Homo sapiens
LDPKSSDKTHTCPPCP

SEQ ID NO: 6739 - protein, 39 aa, Homo sapiens
IEVMYPPPYLDNEKSNGTIIHVKGKHLCPSPLFPGPSKP

SEQ ID NO: 6740 - protein, 12 aa, Homo sapiens
GGAVHTRGLDFA

SEQ ID NO: 6741 - protein, 45 aa, Homo sapiens
TTTPAPRPPTPAPTIASQPLSLRPEACRPAAGGAVHTRGLDFACD

SEQ ID NO: 6742 - protein, 48 aa, Homo sapiens
AKPTTTPAPRPPTPAPTIASQPLSLRPEACRPAAGGAVHTRGLDFACD

SEQ ID NO: 6743 - protein, 45 aa, Homo sapiens; identical to SEQ ID NO: 6741

SEQ ID NO: 6744 - protein, 45 aa, Homo sapiens; identical to SEQ ID NO: 6741

SEQ ID NO: 6745 - protein, 79 aa, Homo sapiens
TTTPAPRPPTPAPTIASQPLSLRPEACRPAAGGAVHTRGLDFACDEPKSPDKTHTCPPCPAPPVAGPSVFLFPPKPKDT

SEQ ID NO: 6746 - protein, 51 aa, Homo sapiens
PAKPTTTPAPRPPTPAPTIASQPLSLRPEACRPAAGGAVHTRGLDFACDIY

SEQ ID NO: 6747 - protein, 69 aa, Homo sapiens
TTTPAPRPPTPAPTIASQPLSLRPEACRPAAGGAVHTRGLDFACDIYIWAPLAGTCGVLLLSLVITLYC

SEQ ID NO: 6748 - protein, 44 aa, Homo sapiens
TTPAPRPPTPAPTIASQPLSLRPEACRPAAGGAVHTRGLDFACD

SEQ ID NO: 6749 - protein, 47 aa, Homo sapiens
TTTPAPRPPTPAPTIASQPLSLRPEACRPAAGGAVHTRGLDFACDIY

SEQ ID NO: 6750 - protein, 11 aa, Homo sapiens
LDKTHTCPPCP

SEQ ID NO: 6751 - protein, 101 aa, Homo sapiens; identical to SEQ ID NO: 6719

SEQ ID NO: 6752 - protein, 16 aa, Homo sapiens
GLAVSTISSFFPPGYQ

SEQ ID NO: 6753 - protein, 16 aa, Homo sapiens
GLAVSTISSFFPPGYQ

SEQ ID NO: 6754 - protein, 282 aa, Homo sapiens
RWPESPKAQASSVPTAQPQAEGSLAKATTAPATTRNTGRGGEEKKKEKEKEEQEERETKTPECPSHTQPLGVYLLTPAVQDLWLRDKATFTCFVVGSDLKDAHLTWEVAGKVPTGGVEEGLLERHSNGSQSQHSRLTLPRSLWNAGTSVTCTLNHPSLPPQRLMALREPAAQAPVKLSLNLLASSDPPEAASWLLCEVSGFSPPNILLMWLEDQREVNTSGFAPARPPPQPGSTTFWAWSVLRVPAPPSPQPATYTCVVSHEDSRTLLNASRSLEVSYVTDH

SEQ ID NO: 6755 - protein, 246 aa, Homo sapiens
YVTVSSQDPAEPKSPDKTHTCPPCPAPELLGGPSVFLFPPKPKDTLMISRTPEVTCVVVDVSHEDPEVKFNWYVDGVEVHNAKTKPREEQYNSTYRVVSVLTVLHQDWLNGKEYKCKVSNKALPAPIEKTISKAKGQPREPQVYTLPPSRDELTKNQVSLTCLVKGFYPSDIAVEWESNGQPENNYKTTPPVLDSDGSFFLYSKLTVDKSRWQQGNVFSCSVMHEALHNHYTQKSLSLSPGKKDPK

SEQ ID NO: 6756 - protein, 45 aa, Homo sapiens
KPTTTPAPRPPTPAPTIASQPLSLRPEACRPAAGGAVHTRGLDFA

SEQ ID NO: 6757 - protein, 16 aa, Homo sapiens
LEPKSCDKTHTCPPCP

SEQ ID NO: 6758 - protein, 43 aa, Homo sapiens
KPTTTPAPRPPTPAPTIASQPLSLRPEACRPAAGGAVHTRGLD

SEQ ID NO: 6759 - protein, 15 aa, Homo sapiens
EPKSCDKTHTCPPCP

SEQ ID NO: 6760 - protein, 16 aa, Homo sapiens
ELKTPLGDTHTCPRCP

SEQ ID NO: 6761 - protein, 15 aa, Homo sapiens
EPKSCDTPPPCPRCP

SEQ ID NO: 6762 - protein, 12 aa, Homo sapiens
ESKYGPPCPSCP

SEQ ID NO: 6763 - protein, 12 aa, Homo sapiens
ERKCCVECPPCP

SEQ ID NO: 6764 - protein, 229 aa, Homo sapiens
ESKYGPPCPPCPAPEFLGGPSVFLFPPKPKDTLMISRTPEVTCVVVDVSQEDPEVQFNWYVDGVEVHNAKTKPREEQFNSTYRVVSVLTVLHQDWLNGKEYKCKVSNKGLPSSIEKTISKAKGQPREPQVYTLPPSQEEMTKNQVSLTCLVKGFYPSDIAVEWESNGQPENNYKTTPPVLDSDGSFFLYSRLTVDKSRWQEGNVFSCSVMHEALHNHYTQKSLSLSLGK

SEQ ID NO: 6765 - protein, 119 aa, Homo sapiens
ESKYGPPCPPCPGQPREPQVYTLPPSQEEMTKNQVSLTCLVKGFYPSDIAVEWESNGQPENNYKTTPPVLDSDGSFFLYSRLTVDKSRWQEGNVFSCSVMHEALHNHYTQKSLSLSLGK

SEQ ID NO: 6766 - protein, 282 aa, Homo sapiens; identical to SEQ ID NO: 6754

SEQ ID NO: 6767 - protein, 281 aa, Homo sapiens
RWPESPKAQASSVPTAQPQAEGSLAKATTAPATTRNTGRGGEEKKKEKEKEEQEERETKTPECPSHTQPLGVYLLTPAVQDLWLRDKATFTCFVVGSDLKDAHLTWEVAGKVPTGGVEEGLLERHSNGSQSQHSRLTLPRSLWNAGTSVTCTLHPSLPPQRLMALREPAAQAPVKLSLNLLASSDPPEAASWLLCEVSGFSPPNILLMWLEDQREVNTSGFAPARPPPQPGSTTFWAWSVLRVPAPPSPQPATYTCVVSHEDSRTLLNASRSLEVSYVTDH

SEQ ID NO: 6768 - protein, 283 aa, Homo sapiens
RWPESPKAQASSVPTAQPQAEGSLAKATTAPATTRNTGRGGEEKKKEKEKEEQEERETKTPECPSHTQPLGVYLLTPAVQDLWLRDKATFTCFVVGSDLKDAHLTWEVAGKVPTGGVEEGLLERHSNGSQSQHSRLTLPRSLWNAGTSVTCTLNHPSLPPQRLMALREPAAQAPVKLSLNLLASSDPPEAASWLLCEVSGFSPPNILLMVVLEDQREVNTSGFAPARPPPQPGSTTFWAWSVLRVPAPPSPQPATYTCVVSHEDSRTLLNASRSLEVSYVTDH

SEQ ID NO: 6769 - protein, 58 aa, Homo sapiens
ESPKAQASSVPTAQPQAEGSLAKATTAPATTRNTGRGGEEKKKEKEKEEQEERETKTP

SEQ ID NO: 6770 - protein, 282 aa, Homo sapiens; identical to SEQ ID NO: 6754

SEQ ID NO: 6771 - protein, 282 aa, Homo sapiens; identical to SEQ ID NO: 6754

SEQ ID NO: 6772 - protein, 281 aa, Homo sapiens
RWPESPKAQASSVPTAQPQAEGSLAKATTAPATTRNTGRGGEEKKKEKEKEEQEERETKTPECPSHTQPLGVYLLTPAVQDLWLRDKATFTCFVVGSDLKDAHLTWEVAGKVPTGGVEEGLLERHSNGSQSQHSRLTLPRSLWNAGTSVTCTLNHPSLPPQRLMALREPAAQAPVKLSLNLLASSDPPEAASWLLCEVSGFSPPNILLMWLEDQREVNTSGFAPARPPQPGSTTFWAWSVLRVPAPPSPQPATYTCVVSHEDSRTLLNASRSLEVSYVTDH

SEQ ID NO: 6773 - protein, 282 aa, Homo sapiens; identical to SEQ ID NO: 6754

SEQ ID NO: 6774 - protein, 234 aa, Homo sapiens
AEPKSPDKTHTCPPCPAPPVAGPSVFLFPPKPKDTLMIARTPEVTCVVVDVSHEDPEVKFNWYVDGVEVHNAKTKPREEQYNSTYRVVSVLTVLHQDWLNGKEYKCKVSNKALPAPIEKTISKAKGQPREPQVYTLPPSRDELTKNQVSLTCLVKGFYPSDIAVEWESNGQPENNYKTTPPVLDSDGSFFLYSKLTVDKSRWQQGNVFSCSVMHEALHNHYTQKSLSLSPGKKD

SEQ ID NO: 6775 - protein, 234 aa, Homo sapiens; identical to SEQ ID NO: 6774

SEQ ID NO: 6776 - protein, 20 aa, Homo sapiens
AEPKSPDKTHTCPPCPKDPK

SEQ ID NO: 6777 - protein, 15 aa, Homo sapiens
EPKSCDKTHTCPPCP

SEQ ID NO: 6778 - protein, 233 aa, Homo sapiens
EPKSPDKTHTCPPCPAPPVAGPSVFLFPPKPKDTLMIARTPEVTCVVVDVSHEDPEVKFNWYVDGVEVHNAKTKPREEQYNSTYRVVSVLTVLHQDWLNGKEVKCKVSNKALPAPIEKTISKAKGQPREPQVYTLPPSRDELTKNQVSLTCLVKGFYPSDIAVEWESNGQPENNYKTTPPVLDSDGSFFLVSKLTVDKSRWQQGNVFSCSVMHEALHNHYTQKSLSLSPGKKD

SEQ ID NO: 6779 - protein, 13 aa, Homo sapiens
SVFLFPPKPKDTL

SEQ ID NO: 6780 - protein, 231 aa, Homo sapiens
EPKSPDKTHTCPPCPAPPVAGPSVFLFPPKPKDTLMIARTPEVTCVVVDVSHEDPEVKFNWYVDGVEVHNAKTKPREEQYNSTYRVVSVLTVLHQDWLNGKEYKCKVSNKALPAPIEKTISKAKGQPREPQVYTLPPSRDELTKNQVSLTCLVKGFYPSDIAVEWESNGQPENNYKTTPPVLDSDGSFFLYSKLTVDKSRWQQGNVFSCSVMHEALHNHYTQKSLSLSPGK

SEQ ID NO: 6781 - protein, 235 aa, Homo sapiens
EPKSPDKTHTCPPCPAPPVAGPSVFLFPPKPKDTLMIARTPEVTCVVVDVSHEDPEVKFNWYVDGVEVHNAKTKPREEQYNSTYRVVSVLTVLHQDWLNGKEYKCKVSNKALPAPIEKTISKAKGQPREPQVYTLPPSRDELTKNQVSLTCLVKGFYPSDIAVEWESNGQPENNYKTTPPVLDSDGSFFLYSKLTVDKSRWQQGNVFSCSVMHEALHNHYTQKSLSLSPGKKDPK

SEQ ID NO: 6782 - protein, 223 aa, Homo sapiens
VECPPCPAPPVAGPSVFLFPPKPKDTLMISRTPEVTCVVVDVSHEDPEVKFNWYVDGVEVHNAKTKPREEQYNSTYRVVSVLTVLHQDWLNGKEYKCKVSNKGLPSSIEKTISKAKGQPREPQVYTLPPSREEMTKNQVSLTCLVKGFYPSDIAVEWESNGQPENNYKTTPPVLDSDGSFFLYSKLTVDKSRWQQGNVFSCSVMHEALHNHYTQKSLSLSPGK

SEQ ID NO: 6783 - protein, 235 aa, Homo sapiens
DPAEPKSPDKTHTCPPCPAPPVAGPSVFLFPPKPKDTLMIARTPEVTCVVVDVSHEDPEVKFNWYVDGVEVHNAKTKPREEQYNSTYRVVSVLTVLHQDWLNGKEYKCKVSNKALPAPIEKTISKAKGQPREPQVYTLPPSRDELTKNQVSLTCLVKGFYPSDIAVEWESNGQPENNYKTTPPVLDSDGSFFLYSKLTVDKSRWQQGNVFSCSVMHEALHNHYTQKSLSLSPGKK

SEQ ID NO: 6784 - protein, 12 aa, Homo sapiens
ERKCCVECPPCP

SEQ ID NO: 6785 - protein, 17 aa, Homo sapiens
ELKTPLGDTTHTCPRCP

SEQ ID NO: 6786 - protein, 61 aa, Homo sapiens
ELKTPLGDTHTCPRCPEPKSCDTPPPCPRCPEPKSCDTPPPCPRCPEPKSCDTPPPCPRCP

SEQ ID NO: 6787 - protein, 230 aa, Homo sapiens
ESKYGPPCPPCPAPEFLGGPSVFLFPPKPKDTLMISRTPEVTCVVVDVSQEDPEVQFNWYVDGVEVHNAKTKPREEQFNSTYRVVSVLTVLHQDWLNGKEYKCKVSNKGLPSSIEKTISKAKGQPREPQVYTLPPSQEEMTKNQVSLTCLVKGFYPSDIAVEWESNGQPENNYKTTPPVLDSDGSFFLYSRLTVDKSRWQEGNVFSCSVMHEALHNHYTQKSLSLSLGKM

SEQ ID NO: 6788 - protein, 230 aa, Homo sapiens
ESKYGPPCPPCPAPEFEGGPSVFLFPPKPKDTLMISRTPEVTCVVVDVSQEDPEVQFNWYVDGVEVHNAKTKPREEQFQSTYRVVSVLTVLHQDWLNGKEYKCKVSNKGLPSSIEKTISKAKGQPREPQVYTLPPSQEEMTKNQVSLTCLVKGFYPSDIAVEWESNGQPENNYKTTPPVLDSDGSFFLYSRLTVDKSRWQEGNVFSCSVMHEALHNHYTQKSLSLSLGKM

SEQ ID NO: 6789 - protein, 12 aa, Homo sapiens
SPNMVPHAHHAQ

SEQ ID NO: 6790 - protein, 107 aa, Homo sapiens
GQPREPQVYTLPPSQEEMTKNQVSLTCLVKGFYPSDIAVEWESNGQPENNYKTTPPVLDSDGSFFLYSRLTVDKSRWQEGNVFSCSVMHEALHNHYTQKSLSLSLGK

SEQ ID NO: 6791 - protein, 129 aa, Homo sapiens
ESKYGPPCPPCPGGGSSGGGSGGQPREPQVYTLPPSQEEMTKNQVSLTCLVKGFYPSDIAVEWESNGQPENNYKTTPPVLDSDGSFFLYSRLTVDKSRWQEGNVFSCSVMHEALHNHYTQKSLSLSLGK

SEQ ID NO: 6792 - protein, 229 aa, Homo sapiens
ESKYGPPCPSCPAPEFEGGPSVFLFPPKPKDTLMISRTPEVTCVVVDVSQEDPEVQFNWYVDGVEVHQAKTKPREEQFNSTYRVVSVLTVLHQDWLNGKEYKCKVSNKGLPSSIEKTISKAKGQPREPQVYTLPPSQEEMTKNQVSLTCLVKGFVPSDIAVEWESNGQPENNYKTTPPVLDSDGSFFLYSRLTVDKSRWQEGNVFSCSVMHEALHNHYTQKSLSLSLGK

SEQ ID NO: 6793 - protein, 229 aa, Homo sapiens
ESKYGPPCPPCPAPEFEGGPSVFLFPPKPKDTLMISRTPEVTCVVVDVSQEDPEVQFNWYVDGVEVHQAKTKPREEQFNSTYRVVSVLTVLHQDWLNGKEYKCKVSNKGLPSSIEKTISKAKGQPREPQVYTLPPSQEEMTKNQVSLTCLVKGFVPSDIAVEWESNGQPENNYKTTPPVLDSDGSFFLYSRLTVDKSRWQEGNVFSCSVMHEALHNHYTQKSLSLSLGK

SEQ ID NO: 6794 - protein, 230 aa, Homo sapiens; identical to SEQ ID NO: 6787

SEQ ID NO: 6795 - protein, 12 aa, Homo sapiens
ESKYGPPCPPCP

SEQ ID NO: 6796 - protein, 119 aa, Homo sapiens; identical to SEQ ID NO: 6765

SEQ ID NO: 6797 - protein, 229 aa, Homo sapiens; identical to SEQ ID NO: 6764

SEQ ID NO: 6798 - protein, 229 aa, Homo sapiens; identical to SEQ ID NO: 6764

SEQ ID NO: 6799 - protein, 9 aa, Homo sapiens
YGPPCPPCP

SEQ ID NO: 6800 - protein, 10 aa, Homo sapiens
KYGPPCPPCP

SEQ ID NO: 6801 - protein, 13 aa, Homo sapiens
EVVKYGPPCPPCP

SEQ ID NO: 6802 - protein, 229 aa, Homo sapiens
ESKYGPPCPSCPAPEFLGGPSVFLFPPKPKDTLMISRTPEVTCVVVDVSQEDPEVQFNWYVDGVEVHNAKTKPREEQFNSTYRVVSVLTVLHQDWLNGKEYKCKVSNKGLPSSIEKTISKAKGQPREPQVYTLPPSQEEMTKNQVSLTCLVKGFYPSDIAVEWESNGQPENNYKTTPPVLDSDGSFFLYSRLTVDLSRWQEGNVFSCSVMHEALHNHYTQKSLSLSLGK

SEQ ID NO: 6803 - protein, 22 aa, Homo sapiens
ESKYGPPCPPCPGGGSSGGGSG

SEQ ID NO: 6804 - protein, 231 aa, Homo sapiens
EPKSPDKTHTCPPCPAPPVAGPSVFLFPPKPKDTLMIARTPEVTCVVVDVSHEDPEVKFNWYVDGVEVHNAKTKPREEQYNSTYRVVSVLTVLHQDWLNGKEYKCKVSNKALPAPIEKTISKAKGQPREPQVYTLPPSRDELTKNQVSLTCLVKGFYPSDIAVEWESNGQPENNYKTIPPVLDSDGSFFLYSKLTVDKSRWQQGNVFSCSVMHEALHNHYTQKSLSLSPGK

SEQ ID NO: 6805 - protein, 231 aa, Homo sapiens
EPKSPDKTHTCPPCPAPPVAGPSVFLFPPKPKDTLMIARTPEVTCVVVDVSHEDPEVKFNWYVDGVEVHNAKTKPREEQYNSTYRVVSVLTVLHQDWLNGKEYKCKVSNKALPAPLEKTISKAKGQPREPQVYTLPPSRDELTKNQVSLTCLVKGFYPSDIAVEWESNGQPENNYKTIPPVLDSDGSFFLYSKLTVDKSRWQQGNVFSCSVMHEALHNHYTQKSLSLSPGK

SEQ ID NO: 6806 - protein, 231 aa, Homo sapiens; identical to SEQ ID NO: 6780

SEQ ID NO: 6807 - protein, 68 aa, Homo sapiens
TTPAPRPPTPAPTIASQPLSLRPEACRPAAGGAVHTRGLDFACDIYIWAPLAGTCGVLLLSLVITLYC

SEQ ID NO: 6808 - protein, 243 aa, Homo sapiens
DIQMTQSSSYLSVSLGGRVTITCKASDHINNWLAWYQQKPGNAPRLLISGATSLETGVPSRFSGSGSGKDYTLSITSLQTEDVATYYCQQYWSTPFTFGSGTKLEIKGGGGSGGGGSGGGGSQVQLKESGPGLVAPSQSLSITSTVSGFSLSRYSVHWVRQPPGKGLEWLGMIWGGGSTDYNSALKSRLSISKDNSKSQVFLKMNSLQTDDTAMYYCARNEGDTTAGTWFAYWGQGTLVTVSS

SEQ ID NO: 6809 - protein, 62 aa, Homo sapiens
ALSNSIMYFSHFVPVFLPAKPTTTPAPRPPTPAPTIASQPLSLRPEACRPAAGGAVHTRGLD

SEQ ID NO: 6810 - protein, 68 aa, Homo sapiens
TTTPAPRPPTPAPTIASQPLSLRPEACRPAAGGAVHTRGLDFACDIYIWAPLAGTCGVLLLSLVITLY

SEQ ID NO: 6811 - protein, 70 aa, Homo sapiens
KPTTTPAPRPPTPAPTIASQPLSLRPEACRPAAGGAVHTRGLDFACDIYIWAPLAGTCGVLLLSLVITLY

SEQ ID NO: 6812 - protein, 674 aa, Artificial Sequence
  source: /note="Description of Artificial Sequence: Synthetic Chimeric Antigen Receptor"
MALPVTALLLPLALLLHAARPQIQLVQSGPEVKKPGETVKISCKASGYTFTNYGMNWVKQAPGKGLKWMGINTYTGEPTYADAFKGRFAFSLETSASTAYLQINNLKNEDTATYFCARDYGDYGMDYWGQGTSVTVSSGGGGSGGGGSGGGGSDIVLTQSPASLAVSLGQRATISCRASKSVSTSGYSFMHWYQQKPGQPPKLLIYLASNLESGVPARFSGSGSGTDFTLNIHPVEEEDAATYYCQHSREVPWTFGGGTKLEIKREPKSPDKTHTCPPCPAPPVAGPSVFLFPPKPKDTLMIARTPEVTCVVVDVSHEDPEVKFNWYVDGVEVHNAKTKPREEQYNSTYRVVSVLTVLHQDWLNGKEYKCKVSNKALPAPIEKTISKAKGQPREPQVYTLPPSRDELTKNQVSLTCLVKGFYPSDIAVEWESNGQPENNYKTTPPVLDSDGSFFLYSKLTVDKSRWQQGNVFSCSVMHEALHNHYTQKSLSLSPGKIYIWAPLAGTCGVLLLSLVITLYCKRGRKKLLYIFKQPFMRPVQTTQEEDGCSCRFPEEEEGGCELRVKFSRSADAPAYQQGQNQLYNELNLGRREEYDVLDKRRGRDPEMGGKPRRKNPQEGLYNELQKDKMAEAYSEIGMKGERRRGKGHDGLYQGLSTATKDTYDALHMQALPPR

SEQ ID NO: 6813 - protein, 705 aa, Artificial Sequence
  source: /note="Description of Artificial Sequence: Synthetic Chimeric Antigen Receptor"
ADAPAYQQGQNQLYNELNLGRREEYDVLDKRRGRDPEMGGKPRRKNPQEGLYNELQKDKMAEAYSEIGMKGERRRGKGHDGLYQGLSTATKDTYDALHMQALPPRRAEGRGSLLTCGDVEENPGPMAVPTQVLGLLLLWLTDARCDIQMTQSPSSLSASVGDRVTITCRASEDIYFNLVWYQQKPGKAPKLLIYDTNRLADGVPSRFSGSGSGTQYTLTISSLQPEDFATYYCQHYKNYPLTFGQGTKLEIKRSGGGGSGGGGSGGGGSRSEVQLVESGGGLVQPGGSLRLSCAASGFTLSNYGMHWIRQAPGKGLEWVSSISLNGGSTYYRDSVKGRFTISRDNAKSTLYLQMNSLRAEDTAVYYCAAQDAYTGGYFDYWGQGTLVTVSSMPCPAPPVAGPSVFLFPPKPKDTLMIARTPEVTCVVVDVSHEDPEVKFNWYVDGVEVHNAKTKPREEQYNSTYRVVSVLTVLHQDWLNGKEYKCKVSNKALPAPIEKTISKAKPCPAPPVAGPSVFLFPPKPKDTLMIARTPEVTCVVVDVSHEDPEVKFNWYVDGVEVHNAKTKPREEQYNSTYRVVSVLTVLHQDWLNGKEYKCKVSNKALPAPIEKTISKAKMALIVLGGVAGLLLFIGLGIFFMALIVLGGVAGLLLFIGLGIFFCVRCRHRRRSGGGGSAQLEKKLQALKKKNAQLKWKLQALKKKLAQ

SEQ ID NO: 6814 - protein, 482 aa, Artificial Sequence
  source: /note="Description of Artificial Sequence: Synthetic Chimeric Antigen Receptor"
MALPVTALLLPLALLLHAARPEVQLLETGGGLVQPGGSLRLSCAVSGFALSNHGMSWVRRAPGKGLEWVSGIVYSGSTYYAASVKGRFTISRDNSRNTLYLQMNSLRPEDTAIYYCSAHGGESDVWGQGTTVTVSSASGGGGSGGRASGGGGSEIVLTQSPATLSVSPGESATLSCRASQSVSSNLAWYQQKPGQAPRLLIYGASTRASGIPDRFSGSGSGTDFTLTISSLQAEDVAVYYCQQYGSSLTFGGGTKVEIKTTTPAPRPPTPAPTIASQPLSLRPEACRPAAGGAVHTRGLDFACDIYIWAPLAGTCGVLLLSLVITLYCKRGRKKLLYIFKQPFMRPVQTTQEEDGCSCRFPEEEEGGCELRVKFSRSADAPAYKQGQNQLYNELNLGRREEYDVLDKRRGRDPEMGGKPRRKNPQEGLYNELQKDKMAEAYSEIGMKGERRRGKGHDGLYQGLSTATKDTYDALHMQALPPR

SEQ ID NO: 6815 - protein, 490 aa, Artificial Sequence
  source: /note="Description of Artificial Sequence: Synthetic Chimeric Antigen Receptor"
LLVTSLLLCELPHPAFLLIPDTDVKLQESGPGLVAPSQSLSITCTVSGFSLTSYAVSWVRQPPGKGLEWLGIIWSGGATNYNSALKSRLSISKDNSKSQVFLKMNGLQTDDTARYYCAREHYYGSSAMDYWGQGASITVSSGGGGSGGGGSGGGGSGIVMTQSPLSLPVSLGDQASISCRSSQSIVHSYGNTYLFWYLQKPGQSPKLLIYRVSNRFSGVPDRFSGSGSGTNFTLKISRVEAEDMGVYYCFQGTHVPYTFGGGTKLEIKAAAIEVMYPPPYLDNEKSNGTIIHVKGKHLCPSPLFPGPSKPFWVLVVVGGVLACYSLLVTVAFIIFWVRSKRSRLLHSDYMNMTPRRPGPTRKHYQPYAPPRDFAAYRSRVKFSRSADAPAYQQGQNQLYNELNLGRREEYDVLDKRRGRDPEMGGKPRRKNPQEGLYNELQKDKMAEAYSEIGMKGERRRGKGHDGLYQGLSTATKDTYDALHMQALPPR

SEQ ID NO: 6816 - protein, 730 aa, Artificial Sequence
  source: /note="Description of Artificial Sequence: Synthetic Chimeric Antigen Receptor"
LLVTSLLLCELPHPAFLLIPDTDVKLQESGPGLVAPSQSLSITCTVSGFSLTSYAVSWVRQPPGKGLEWLGIIWSGGATNYNSALKSRLSISKDNSKSQVFLKMNGLQTDDTARYYCAREHYYGSSAMDYWGQGASITVSSGGGGSGGGGSGGGGSGIVMTQSPLSLPVSLGDQASISCRSSQSIVHSYGNTYLFWYLQKPGQSPKLLIYRVSNRFSGVPDRFSGSGSGTNFTLKISRVEAEDMGVYYCFQGTHVPYTFGGGTKLEIKEPKSCDKTHTCPPCPAPELLGGPSVFLFPPKPKDTLMISRTPEVTCVVVDVSHEDPEVKFNWYVDGVEVHNAKTKPREEQYNSTYRVVSVLTVLHQDWLNGKEYKCKVSNKALPAPIEKTISKAKGQPREPQVYTLPPSRDELTKNQVSLTCLVKGFYPSDIAVEWESNGQPENNYKTTPPVLDSDGSFFLYSKLTVDKSRWQQGNVFSCSVMHEALHNHYTQKSLSLSPGKKDPKAAATTTPAPRPPTPAPTIASQPLSLRPEACRPAAGGAVHTRGLDFACDIYIWAPLAGTCGVLLLSLVITLYCKRGRKKLLYIFKQPFMRPVQTTQEEDGCSCRFPEEEEGGCELRVKFSRSADAPAYKQGQNQLYNELNLGRREEYDVLDKRRGRDPEMGGKPRRKNPQEGLYNELQKDKMAEAYSEIGMKGERRRGKGHDGLYQGLSTATKDTYDALHMQALPPR

SEQ ID NO: 6817 - protein, 494 aa, Artificial Sequence
  source: /note="Description of Artificial Sequence: Synthetic Chimeric Antigen Receptor"
LLVTSLLLCELPHPAFLLIPDTDVKLQESGPGLVAPSQSLSITCTVSGFSLTSYAVSWVRQPPGKGLEWLGIIWSGGATNYNSALKSRLSISKDNSKSQVFLKMNGLQTDDTARYYCAREHYYGSSAMDYWGQGASITVSSGGGGSGGGGSGGGGSGIVMTQSPLSLPVSLGDQASISCRSSQSIVHSYGNTYLFWYLQKPGQSPKLLIYRVSNRFSGVPDRFSGSGSGTNFTLKISRVEAEDMGVYYCFQGTHVPYTFGGGTKLEIKAAATTTPAPRPPTPAPTIASQPLSLRPEACRPAAGGAVHTRGLDFACDIYIWAPLAGTCGVLLLSLVITLYCKRGRKKLLYIFKQPFMRPVQTTQEEDGCSCRFPEEEEGGCELRVKFSRSADAPAYKQGQNQLYNELNLGRREEYDVLDKRRGRDPEMGGKPRRKNPQEGLYNELQKDKMAEAYSEIGMKGERRRGKGHDGLYQGLSTATKDTYDALHMQALPPR

SEQ ID NO: 6818 - protein, 790 aa, Artificial Sequence
  source: /note="Description of Artificial Sequence: Synthetic Chimeric Antigen Receptor"
LLVTSLLLCELPHPAFLLIPDTDVKLQESGPGLVAPSQSLSITCTVSGFSLTSYAVSWVRQPPGKGLEWLGIIWSGGATNYNSALKSRLSISKDNSKSQVFLKMNGLQTDDTARYYCAREHYYGSSAMDYWGQGASITVSSGGGGSGGGGSGGGGSGIVMTQSPLSLPVSLGDQASISCRSSQSIVHSYGNTYLFWYLQKPGQSPKLLIYRVSNRFSGVPDRFSGSGSGTNFTLKISRVEAEDMGVYYCFQGTHVPYTFGGGTKLEIKEPKSCDKTHTCPPCPAPELLGGPSVFLFPPKPKDTLMISRTPEVTCVVVDVSHEDPEVKFNWYVDGVEVHNAKTKPREEQYNSTYRVVSVLTVLHQDWLNGKEYKCKVSNKALPAPIEKTISKAKGQPREPQVYTLPPSRDELTKNQVSLTCLVKGFYPSDIAVEWESNGQPENNYKTTPPVLDSDGSFFLYSKLTVDKSRWQQGNVFSCSVMHEALHNHYTQKSLSLSPGKKDPKAAAFVPVFLPAKPTTTPAPRPPTPAPTIASQPLSLRPEACRPAAGGAVHTRGLDFACDIYIWAPLAGTCGVLLLSLVITLYCNHRNRSKRSRLLHSDYMNMTPRRPGPTRKHYQPYAPPRDFAAYRSRFSVVKRGRKKLLYIFKQPFMRPVQTTQEEDGCSCRFPEEEEGGCELRVKFSRSADAPAYQQGQNQLYNELNLGRREEYDVLDKRRGRDPEMGGKPRRKNPQEGLYNELQKDKMAEAYSEIGMKGERRRGKGHDGLYQGLSTATKDTYDALHMQALPPR

SEQ ID NO: 6819 - protein, 554 aa, Artificial Sequence
  source: /note="Description of Artificial Sequence: Synthetic Chimeric Antigen Receptor"
LLVTSLLLCELPHPAFLLIPDTDVKLQESGPGLVAPSQSLSITCTVSGFSLTSYAVSWVRQPPGKGLEWLGIIWSGGATNYNSALKSRLSISKDNSKSQVFLKMNGLQTDDTARYYCAREHYYGSSAMDYWGQGASITVSSGGGGSGGGGSGGGGSGIVMTQSPLSLPVSLGDQASISCRSSQSIVHSYGNTYLFWYLQKPGQSPKLLIYRVSNRFSGVPDRFSGSGSGTNFTLKISRVEAEDMGVYYCFQGTHVPYTFGGGTKLEIKAAAFVPVFLPAKPTTTPAPRPPTPAPTIASQPLSLRPEACRPAAGGAVHTRGLDFACDIYIWAPLAGTCGVLLLSLVITLYCNHRNRSKRSRLLHSDYMNMTPRRPGPTRKHYQPYAPPRDFAAYRSRFSVVKRGRKKLLYIFKQPFMRPVQTTQEEDGCSCRFPEEEEGGCELRVKFSRSADAPAYQQGQNQLYNELNLGRREEYDVLDKRRGRDPEMGGKPRRKNPQEGLYNELQKDKMAEAYSEIGMKGERRRGKGHDGLYQGLSTATKDTYDALHMQALPPR

SEQ ID NO: 6820 - protein, 728 aa, Artificial Sequence
  source: /note="Description of Artificial Sequence: Synthetic Chimeric Antigen Receptor"
LLVTSLLLCELPHPAFLLIPDTQVQLQQSGAELVKPGASVKISCKASGYAFSSYWMNWVKQRPGKGLEWIGQIYPGDGDTTYNGKFKGKATLTADKSSSTVYMQLNSLTSEDSAVYFCVRYYYGSSGYFDYWGQGTTLTVSSGGGGSGGGGSGGGGSDVQMIQTPDSLAVSLGQRATISCRASESVDNYGISFMHWYQQKPGQSPKLLIYRASNLESGIPARFSGSGSRTDFTLTINPVETDDVATYYCQQNNKDPPTFGGGTKLEIKRAEPKSCDKTHTCPPCPAPELLGGPSVFLFPPKPKDTLMISRTPEVTCVVVDVSHEDPEVKFNWYVDGVEVHNAKTKPREEQYNSTYRVVSVLTVLHQDWLNGKEYKCKVSNKALPAPIEKTISKAKGQPREPQVYTLPPSRDELTKNQVSLTCLVKGFYPSDIAVEWESNGQPENNYKTTPPVLDSDGSFFLYSKLTVDKSRWQQGNVFSCSVMHEALHNHYTQKSLSLSPGKKDPKAAAIEVMYPPPYLDNEKSNGTIIHVKGKHLCPSPLFPGPSKPFWVLVVVGGVLACYSLLVTVAFIIFWVRSKRSRLLHSDYMNMTPRRPGPTRKHYQPYAPPRDFAAYRSRVKFSRSADAPAYQQGQNQLYNELNLGRREEYDVLDKRRGRDPEMGGKPRRKNPQEGLYNELQKDKMAEAYSEIGMKGERRRGKGHDGLYQGLSTATKDTYDALHMQALPPR

SEQ ID NO: 6821 - protein, 491 aa, Artificial Sequence
  source: /note="Description of Artificial Sequence: Synthetic Chimeric Antigen Receptor"
LLVTSLLLCELPHPAFLLIPDTQVQLQQSGAELVKPGASVKISCKASGYAFSSYWMNWVKQRPGKGLEWIGQIYPGDGDTTYNGKFKGKATLTADKSSSTVYMQLNSLTSEDSAVYFCVRYYYGSSGYFDYWGQGTTLTVSSGGGGSGGGGSGGGGSDVQMIQTPDSLAVSLGQRATISCRASESVDNYGISFMHWYQQKPGQSPKLLIYRASNLESGIPARFSGSGSRTDFTLTINPVETDDVATYYCQQNNKDPPTFGGGTKLEIKRAAAIEVMYPPPYLDNEKSNGTIIHVKGKHLCPSPLFPGPSKPFWVLVVVGGVLACYSLLVTVAFIIFWVRSKRSRLLHSDYMNMTPRRPGPTRKHYQPYAPPRDFAAYRSRVKFSRSADAPAYQQGQNQLYNELNLGRREEYDVLDKRRGRDPEMGGKPRRKNPQEGLYNELQKDKMAEAYSEIGMKGERRRGKGHDGLYQGLSTATKDTYDALHMQALPPR

SEQ ID NO: 6822 - protein, 732 aa, Artificial Sequence
  source: /note="Description of Artificial Sequence: Synthetic Chimeric Antigen Receptor"
LLVTSLLLCELPHPAFLLIPDTQVQLQQSGAELVKPGASVKISCKASGYAFSSYWMNWVKQRPGKGLEWIGQIYPGDGDTTYNGKFKGKATLTADKSSSTVYMQLNSLTSEDSAVYFCVRYYYGSSGYFDYWGQGTTLTVSSGGGGSGGGGSGGGGSDVQMIQTPDSLAVSLGQRATISCRASESVDNYGISFMHWYQQKPGQSPKLLIYRASNLESGIPARFSGSGSRTDFTLTINPVETDDVATYYCQQNNKDPPTFGGGTKLEIKRAEPKSCDKTHTCPPCPAPELLGGPSVFLFPPKPKDTLMISRTPEVTCVVVDVSHEDPEVKFNWYVDGVEVHNAKTKPREEQYNSTYRVVSVLTVLHQDWLNGKEYKCKVSNKALPAPIEKTISKAKGQPREPQVYTLPPSRDELTKNQVSLTCLVKGFYPSDIAVEWESNGQPENNYKTTPPVLDSDGSFFLYSKLTVDKSRWQQGNVFSCSVMHEALHNHYTQKSLSLSPGKKDPKAAATTTPAPRPPTPAPTIASQPLSLRPEACRPAAGGAVHTRGLDFACDIYIWAPLAGTCGVLLLSLVITLYCKRGRKKLLYIFKQPFMRPVQTTQEEDGCSCRFPEEEEGGCELRVKFSRSADAPAYKQGQNQLYNELNLGRREEYDVLDKRRGRDPEMGGKPRRKNPQEGLYNELQKDKMAEAYSEIGMKGERRRGKGHDGLYQGLSTATKDTYDALHMQALPPR

SEQ ID NO: 6823 - protein, 495 aa, Artificial Sequence
  source: /note="Description of Artificial Sequence: Synthetic Chimeric Antigen Receptor"
LLVTSLLLCELPHPAFLLIPDTQVQLQQSGAELVKPGASVKISCKASGYAFSSYWMNWVKQRPGKGLEWIGQIYPGDGDTTYNGKFKGKATLTADKSSSTVYMQLNSLTSEDSAVYFCVRYYYGSSGYFDYWGQGTTLTVSSGGGGSGGGGSGGGGSDVQMIQTPDSLAVSLGQRATISCRASESVDNYGISFMHWYQQKPGQSPKLLIYRASNLESGIPARFSGSGSRTDFTLTINPVETDDVATYYCQQNNKDPPTFGGGTKLEIKRAAATTTPAPRPPTPAPTIASQPLSLRPEACRPAAGGAVHTRGLDFACDIYIWAPLAGTCGVLLLSLVITLYCKRGRKKLLYIFKQPFMRPVQTTQEEDGCSCRFPEEEEGGCELRVKFSRSADAPAYKQGQNQLYNELNLGRREEYDVLDKRRGRDPEMGGKPRRKNPQEGLYNELQKDKMAEAYSEIGMKGERRRGKGHDGLYQGLSTATKDTYDALHMQALPPR

SEQ ID NO: 6824 - protein, 792 aa, Artificial Sequence
  source: /note="Description of Artificial Sequence: Synthetic Chimeric Antigen Receptor"
LLVTSLLLCELPHPAFLLIPDTQVQLQQSGAELVKPGASVKISCKASGYAFSSYWMNWVKQRPGKGLEWIGQIYPGDGDTTYNGKFKGKATLTADKSSSTVYMQLNSLTSEDSAVYFCVRYYYGSSGYFDYWGQGTTLTVSSGGGGSGGGGSGGGGSDVQMIQTPDSLAVSLGQRATISCRASESVDNYGISFMHWYQQKPGQSPKLLIYRASNLESGIPARFSGSGSRTDFTLTINPVETDDVATYYCQQNNKDPPTFGGGTKLEIKRAEPKSCDKTHTCPPCPAPELLGGPSVFLFPPKPKDTLMISRTPEVTCVVVDVSHEDPEVKFNWYVDGVEVHNAKTKPREEQYNSTYRVVSVLTVLHQDWLNGKEYKCKVSNKALPAPIEKTISKAKGQPREPQVYTLPPSRDELTKNQVSLTCLVKGFYPSDIAVEWESNGQPENNYKTTPPVLDSDGSFFLYSKLTVDKSRWQQGNVFSCSVMHEALHNHYTQKSLSLSPGKKDPKAAAFVPVFLPAKPTTTPAPRPPTPAPTIASQPLSLRPEACRPAAGGAVHTRGLDFACDIYIWAPLAGTCGVLLLSLVITLYCNHRNRSKRSRLLHSDYMNMTPRRPGPTRKHYQPYAPPRDFAAYRSRFSVVKRGRKKLLYIFKQPFMRPVQTTQEEDGCSCRFPEEEEGGCELRVKFSRSADAPAYQQGQNQLYNELNLGRREEYDVLDKRRGRDPEMGGKPRRKNPQEGLYNELQKDKMAEAYSEIGMKGERRRGKGHDGLYQGLSTATKDTYDALHMQALPPR

SEQ ID NO: 6825 - protein, 555 aa, Artificial Sequence
  source: /note="Description of Artificial Sequence: Synthetic Chimeric Antigen Receptor"
LLVTSLLLCELPHPAFLLIPDTQVQLQQSGAELVKPGASVKISCKASGYAFSSYWMNWVKQRPGKGLEWIGQIYPGDGDTTYNGKFKGKATLTADKSSSTVYMQLNSLTSEDSAVYFCVRYYYGSSGYFDYWGQGTTLTVSSGGGGSGGGGSGGGGSDVQMIQTPDSLAVSLGQRATISCRASESVDNYGISFMHWYQQKPGQSPKLLIYRASNLESGIPARFSGSGSRTDFTLTINPVETDDVATYYCQQNNKDPPTFGGGTKLEIKRAAAFVPVFLPAKPTTTPAPRPPTPAPTIASQPLSLRPEACRPAAGGAVHTRGLDFACDIYIWAPLAGTCGVLLLSLVITLYCNHRNRSKRSRLLHSDYMNMTPRRPGPTRKHYQPYAPPRDFAAYRSRFSVVKRGRKKLLYIFKQPFMRPVQTTQEEDGCSCRFPEEEEGGCELRVKFSRSADAPAYQQGQNQLYNELNLGRREEYDVLDKRRGRDPEMGGKPRRKNPQEGLYNELQKDKMAEAYSEIGMKGERRRGKGHDGLYQGLSTATKDTYDALHMQALPPR

SEQ ID NO: 6826 - protein, 725 aa, Artificial Sequence
  source: /note="Description of Artificial Sequence: Synthetic Chimeric Antigen Receptor"
LLVTSLLLCELPHPAFLLIPDTDVQLQESGPVLVKTGASVKMSCTASGYTFTDHFMDWVKQSHGKSLEWIGSLNPYSGGTSYNQKFKGKATLTVDKSSSTAYMELNSLTSVDSAVYYCARHNWGAYFDYWGQGTTLTVSSGGGGSGGGGSGGGGSDIVMTQAAPSVPVTPGESVSISCRSSKSLLHSNGNTYLYWFLQRPGQSPQRLIYYMSNLASGVPDRFSGRGSGTDFTLRISRVEAEDVGVYYCMQGLEDPYTFGGGTKLEIKEPKSCDKTHTCPPCPAPELLGGPSVFLFPPKPKDTLMISRTPEVTCVVVDVSHEDPEVKFNWYVDGVEVHNAKTKPREEQYNSTYRVVSVLTVLHQDWLNGKEYKCKVSNKALPAPIEKTISKAKGQPREPQVYTLPPSRDELTKNQVSLTCLVKGFYPSDIAVEWESNGQPENNYKTTPPVLDSDGSFFLYSKLTVDKSRWQQGNVFSCSVMHEALHNHYTQKSLSLSPGKKDPKAAAIEVMYPPPYLDNEKSNGTIIHVKGKHLCPSPLFPGPSKPFWVLVVVGGVLACYSLLVTVAFIIFWVRSKRSRLLHSDYMNMTPRRPGPTRKHYQPYAPPRDFAAYRSRVKFSRSADAPAYQQGQNQLYNELNLGRREEYDVLDKRRGRDPEMGGKPRRKNPQEGLYNELQKDKMAEAYSEIGMKGERRRGKGHDGLYQGLSTATKDTYDALHMQALPPR

SEQ ID NO: 6827 - protein, 489 aa, Artificial Sequence
  source: /note="Description of Artificial Sequence: Synthetic Chimeric Antigen Receptor"
LLVTSLLLCELPHPAFLLIPDTDVQLQESGPVLVKTGASVKMSCTASGYTFTDHFMDWVKQSHGKSLEWIGSLNPYSGGTSYNQKFKGKATLTVDKSSSTAYMELNSLTSVDSAVYYCARHNWGAYFDYWGQGTTLTVSSGGGGSGGGGSGGGGSDIVMTQAAPSVPVTPGESVSISCRSSKSLLHSNGNTYLYWFLQRPGQSPQRLIYYMSNLASGVPDRFSGRGSGTDFTLRISRVEAEDVGVYYCMQGLEDPYTFGGGTKLEIKAAAIEVMYPPPYLDNEKSNGTIIHVKGKHLCPSPLFPGPSKPFWVLVVVGGVLACYSLLVTVAFIIFWVRSKRSRLLHSDYMNMTPRRPGPTRKHYQPYAPPRDFAAYRSRVKFSRSADAPAYQQGQNQLYNELNLGRREEYDVLDKRRGRDPEMGGKPRRKNPQEGLYNELQKDKMAEAYSEIGMKGERRRGKGHDGLYQGLSTATKDTYDALHMQALPPR

SEQ ID NO: 6828 - protein, 729 aa, Artificial Sequence
  source: /note="Description of Artificial Sequence: Synthetic Chimeric Antigen Receptor"
LLVTSLLLCELPHPAFLLIPDTDVQLQESGPVLVKTGASVKMSCTASGYTFTDHFMDWVKQSHGKSLEWIGSLNPYSGGTSYNQKFKGKATLTVDKSSSTAYMELNSLTSVDSAVYYCARHNWGAYFDYWGQGTTLTVSSGGGGSGGGGSGGGGSDIVMTQAAPSVPVTPGESVSISCRSSKSLLHSNGNTYLYWFLQRPGQSPQRLIYYMSNLASGVPDRFSGRGSGTDFTLRISRVEAEDVGVYYCMQGLEDPYTFGGGTKLEIKEPKSCDKTHTCPPCPAPELLGGPSVFLFPPKPKDTLMISRTPEVTCVVVDVSHEDPEVKFNWYVDGVEVHNAKTKPREEQYNSTYRVVSVLTVLHQDWLNGKEYKCKVSNKALPAPIEKTISKAKGQPREPQVYTLPPSRDELTKNQVSLTCLVKGFYPSDIAVEWESNGQPENNYKTTPPVLDSDGSFFLYSKLTVDKSRWQQGNVFSCSVMHEALHNHYTQKSLSLSPGKKDPKAAATTTPAPRPPTPAPTIASQPLSLRPEACRPAAGGAVHTRGLDFACDIYIWAPLAGTCGVLLLSLVITLYCKRGRKKLLYIFKQPFMRPVQTTQEEDGCSCRFPEEEEGGCELRVKFSRSADAPAYKQGQNQLYNELNLGRREEYDVLDKRRGRDPEMGGKPRRKNPQEGLYNELQKDKMAEAYSEIGMKGERRRGKGHDGLYQGLSTATKDTYDALHMQALPPR

SEQ ID NO: 6829 - protein, 493 aa, Artificial Sequence
  source: /note="Description of Artificial Sequence: Synthetic Chimeric Antigen Receptor"
LLVTSLLLCELPHPAFLLIPDTDVQLQESGPVLVKTGASVKMSCTASGYTFTDHFMDWVKQSHGKSLEWIGSLNPYSGGTSYNQKFKGKATLTVDKSSSTAYMELNSLTSVDSAVYYCARHNWGAYFDYWGQGTTLTVSSGGGGSGGGGSGGGGSDIVMTQAAPSVPVTPGESVSISCRSSKSLLHSNGNTYLYWFLQRPGQSPQRLIYYMSNLASGVPDRFSGRGSGTDFTLRISRVEAEDVGVYYCMQGLEDPYTFGGGTKLEIKAAATTTPAPRPPTPAPTIASQPLSLRPEACRPAAGGAVHTRGLDFACDIYIWAPLAGTCGVLLLSLVITLYCKRGRKKLLYIFKQPFMRPVQTTQEEDGCSCRFPEEEEGGCELRVKFSRSADAPAYKQGQNQLYNELNLGRREEYDVLDKRRGRDPEMGGKPRRKNPQEGLYNELQKDKMAEAYSEIGMKGERRRGKGHDGLYQGLSTATKDTYDALHMQALPPR

SEQ ID NO: 6830 - protein, 789 aa, Artificial Sequence [sequence omitted]

SEQ ID NO: 6831 - protein, 553 aa, Artificial Sequence
  source: /note="Description of Artificial Sequence: Synthetic Chimeric Antigen Receptor"
LLVTSLLLCELPHPAFLLIPDTDVQLQESGPVLVKTGASVKMSCTASGYTFTDHFMDWVKQSHGKSLEWIGSLNPYSGGTSYNQKFKGKATLTVDKSSSTAYMELNSLTSVDSAVYYCARHNWGAYFDYWGQGTTLTVSSGGGGSGGGGSGGGGSDIVMTQAAPSVPVTPGESVSISCRSSKSLLHSNGNTYLYWFLQRPGQSPQRLIYYMSNLASGVPDRFSGRGSGTDFTLRISRVEAEDVGVYYCMQGLEDPYTFGGGTKLEIKAAAFVPVFLPAKPTTTPAPRPPTPAPTIASQPLSLRPEACRPAAGGAVHTRGLDFACDIYIWAPLAGTCGVLLLSLVITLYCNHRNRSKRSRLLHSDYMNMTPRRPGPTRKHYQPYAPPRDFAAYRSRFSVVKRGRKKLLYIFKQPFMRPVQTTQEEDGCSCRFPEEEEGGCELRVKFSRSADAPAYQQGQNQLYNELNLGRREEYDVLDKRRGRDPEMGGKPRRKNPQEGLYNELQKDKMAEAYSEIGMKGERRRGKGHDGLYQGLSTATKDTYDALHMQALPPR

SEQ ID NO: 6832 - protein, 724 aa, Artificial Sequence
  source: /note="Description of Artificial Sequence: Synthetic Chimeric Antigen Receptor"
LLVTSLLLCELPHPAFLLIPDTALQLQQSGAELVRPGASVTLSCKASGYTFTDYEMHWVKQTPVHGLEWIGAIDPETGGTAYNQKFEGKAILTADKSSSTAYMELRSLTSEDSPVYYCARRRYYGSSSFDYWGQGTTLTVSSGGGGSGGGGSGGGGSDVQMIQTPSSLSASLGDRVTISCRASQDIGNYLNWYQQKPDGTVKLLIYYTSRLHSGVPSRFSGSGSGTEYSLTISNLEQEDIATYFCQQGSALPPTFGGGTKLEINRAEPKSCDKTHTCPPCPAPELLGGPSVFLFPPKPKDTLMISRTPEVTCVVVDVSHEDPEVKFNWYVDGVEVHNAKTKPREEQYNSTYRVVSVLTVLHQDWLNGKEYKCKVSNKALPAPIEKTISKAKGQPREPQVYTLPPSRDELTKNQVSLTCLVKGFYPSDIAVEWESNGQPENNYKTTPPVLDSDGSFFLYSKLTVDKSRWQQGNVFSCSVMHEALHNHYTQKSLSLSPGKKDPKAAAIEVMYPPPYLDNEKSNGTIIHVKGKHLCPSPLFPGPSKPFWVLVVVGGVLACYSLLVTVAFIIFWVRSKRSRLLHSDYMNMTPRRPGPTRKHYQPYAPPRDFAAYRSRVKFSRSADAPAYQQGQNQLYNELNLGRREEYDVLDKRRGRDPEMGGKPRRKNPQEGLYNELQKDKMAEAYSEIGMKGERRRGKGHDGLYQGLSTATKDTYDALHMQALPPR

SEQ ID NO: 6833 - protein, 487 aa, Artificial Sequence
  source: /note="Description of Artificial Sequence: Synthetic Chimeric Antigen Receptor"
LLVTSLLLCELPHPAFLLIPDTALQLQQSGAELVRPGASVTLSCKASGYTFTDYEMHWVKQTPVHGLEWIGAIDPETGGTAYNQKFEGKAILTADKSSSTAYMELRSLTSEDSPVYYCARRRYYGSSSFDYWGQGTTLTVSSGGGGSGGGGSGGGGSDVQMIQTPSSLSASLGDRVTISCRASQDIGNYLNWYQQKPDGTVKLLIYYTSRLHSGVPSRFSGSGSGTEYSLTISNLEQEDIATYFCQQGSALPPTFGGGTKLEINRAAAIEVMYPPPYLDNEKSNGTIIHVKGKHLCPSPLFPGPSKPFWVLVVVGGVLACYSLLVTVAFIIFWVRSKRSRLLHSDYMNMTPRRPGPTRKHYQPYAPPRDFAAYRSRVKFSRSADAPAYQQGQNQLYNELNLGRREEYDVLDKRRGRDPEMGGKPRRKNPQEGLYNELQKDKMAEAYSEIGMKGERRRGKGHDGLYQGLSTATKDTYDALHMQALPPR

SEQ ID NO: 6834 - protein, 728 aa, Artificial Sequence
  source: /note="Description of Artificial Sequence: Synthetic Chimeric Antigen Receptor"
LLVTSLLLCELPHPAFLLIPDTALQLQQSGAELVRPGASVTLSCKASGYTFTDYEMHWVKQTPVHGLEWIGAIDPETGGTAYNQKFEGKAILTADKSSSTAYMELRSLTSEDSPVYYCARRRYYGSSSFDYWGQGTTLTVSSGGGGSGGGGSGGGGSDVQMIQTPSSLSASLGDRVTISCRASQDIGNYLNWYQQKPDGTVKLLIYYTSRLHSGVPSRFSGSGSGTEYSLTISNLEQEDIATYFCQQGSALPPTFGGGTKLEINRAEPKSCDKTHTCPPCPAPELLGGPSVFLFPPKPKDTLMISRTPEVTCVVVDVSHEDPEVKFNWYVDGVEVHNAKTKPREEQYNSTYRVVSVLTVLHQDWLNGKEYKCKVSNKALPAPIEKTISKAKGQPREPQVYTLPPSRDELTKNQVSLTCLVKGFYPSDIAVEWESNGQPENNYKTTPPVLDSDGSFFLYSKLTVDKSRWQQGNVFSCSVMHEALHNHYTQKSLSLSPGKKDPKAAATTTPAPRPPTPAPTIASQPLSLRPEACRPAAGGAVHTRGLDFACDIYIWAPLAGTCGVLLLSLVITLYCKRGRKKLLYIFKQPFMRPVQTTQEEDGCSCRFPEEEEGGCELRVKFSRSADAPAYKQGQNQLYNELNLGRREEYDVLDKRRGRDPEMGGKPRRKNPQEGLYNELQKDKMAEAYSEIGMKGERRRGKGHDGLYQGLSTATKDTYDALHMQALPPR

SEQ ID NO: 6835 - protein, 491 aa, Artificial Sequence
  source: /note="Description of Artificial Sequence: Synthetic Chimeric Antigen Receptor"
LLVTSLLLCELPHPAFLLIPDTALQLQQSGAELVRPGASVTLSCKASGYTFTDYEMHWVKQTPVHGLEWIGAIDPETGGTAYNQKFEGKAILTADKSSSTAYMELRSLTSEDSPVYYCARRRYYGSSSFDYWGQGTTLTVSSGGGGSGGGGSGGGGSDVQMIQTPSSLSASLGDRVTISCRASQDIGNYLNWYQQKPDGTVKLLIYYTSRLHSGVPSRFSGSGSGTEYSLTISNLEQEDIATYFCQQGSALPPTFGGGTKLEINRAAATTTPAPRPPTPAPTIASQPLSLRPEACRPAAGGAVHTRGLDFACDIYIWAPLAGTCGVLLLSLVITLYCKRGRKKLLYIFKQPFMRPVQTTQEEDGCSCRFPEEEEGGCELRVKFSRSADAPAYKQGQNQLYNELNLGRREEYDVLDKRRGRDPEMGGKPRRKNPQEGLYNELQKDKMAEAYSEIGMKGERRRGKGHDGLYQGLSTATKDTYDALHMQALPPR

SEQ ID NO: 6836 - protein, 788 aa, Artificial Sequence
  source: /note="Description of Artificial Sequence: Synthetic Chimeric Antigen Receptor"
LLVTSLLLCELPHPAFLLIPDTALQLQQSGAELVRPGASVTLSCKASGYTFTDYEMHWVKQTPVHGLEWIGAIDPETGGTAYNQKFEGKAILTADKSSSTAYMELRSLTSEDSPVYYCARRRYYGSSSFDYWGQGTTLTVSSGGGGSGGGGSGGGGSDVQMIQTPSSLSASLGDRVTISCRASQDIGNYLNWYQQKPDGTVKLLIYYTSRLHSGVPSRFSGSGSGTEYSLTISNLEQEDIATYFCQQGSALPPTFGGGTKLEINRAEPKSCDKTHTCPPCPAPELLGGPSVFLFPPKPKDTLMISRTPEVTCVVVDVSHEDPEVKFNWYVDGVEVHNAKTKPREEQYNSTYRVVSVLTVLHQDWLNGKEYKCKVSNKALPAPIEKTISKAKGQPREPQVYTLPPSRDELTKNQVSLTCLVKGFYPSDIAVEWESNGQPENNYKTTPPVLDSDGSFFLYSKLTVDKSRWQQGNVFSCSVMHEALHNHYTQKSLSLSPGKKDPKAAAFVPVFLPAKPTTTPAPRPPTPAPTIASQPLSLRPEACRPAAGGAVHTRGLDFACDIYIWAPLAGTCGVLLLSLVITLYCNHRNRSKRSRLLHSDYMNMTPRRPGPTRKHYQPYAPPRDFAAYRSRFSVVKRGRKKLLYIFKQPFMRPVQTTQEEDGCSCRFPEEEEGGCELRVKFSRSADAPAYQQGQNQLYNELNLGRREEYDVLDKRRGRDPEMGGKPRRKNPQEGLYNELQKDKMAEAYSEIGMKGERRRGKGHDGLYQGLSTATKDTYDALHMQALPPR

SEQ ID NO: 6837 - protein, 551 aa, Artificial Sequence
  source: /note="Description of Artificial Sequence: Synthetic Chimeric Antigen Receptor"
LLVTSLLLCELPHPAFLLIPDTALQLQQSGAELVRPGASVTLSCKASGYTFTDYEMHWVKQTPVHGLEWIGAIDPETGGTAYNQKFEGKAILTADKSSSTAYMELRSLTSEDSPVYYCARRRYYGSSSFDYWGQGTTLTVSSGGGGSGGGGSGGGGSDVQMIQTPSSLSASLGDRVTISCRASQDIGNYLNWYQQKPDGTVKLLIYYTSRLHSGVPSRFSGSGSGTEYSLTISNLEQEDIATYFCQQGSALPPTFGGGTKLEINRAAAFVPVFLPAKPTTTPAPRPPTPAPTIASQPLSLRPEACRPAAGGAVHTRGLDFACDIYIWAPLAGTCGVLLLSLVITLYCNHRNRSKRSRLLHSDYMNMTPRRPGPTRKHYQPYAPPRDFAAYRSRFSVVKRGRKKLLYIFKQPFMRPVQTTQEEDGCSCRFPEEEEGGCELRVKFSRSADAPAYQQGQNQLYNELNLGRREEYDVLDKRRGRDPEMGGKPRRKNPQEGLYNELQKDKMAEAYSEIGMKGERRRGKGHDGLYQGLSTATKDTYDALHMQALPPR

SEQ ID NO: 6838 - protein, 728 aa, Artificial Sequence
  source: /note="Description of Artificial Sequence: Synthetic Chimeric Antigen Receptor"
LLVTSLLLCELPHPAFLLIPDTQVQLQQSGAEVKKPGSSVKVSCKASGFSLTSYAISWVRQAPGQGLEWMGGIIWSGGATNYAQKFQGRVTITADESTSTAYMELSSLRSEDTAVYYCAREHYYGSSAMDYWWGQGTMVTVSSGGGGSGGGGSGGGGSEIVLTQSPATLSLSPGERATLSCRASQSIVHSYGNTYAWYQQKPGQAPRLLIYRVSRATGIPARFSGSGSGTDFTLTISSLEPEDFAVYYCFQGTHVPYTFFGQGTKLEIKREPKSCDKTHTCPPCPAPELLGGPSVFLFPPKPKDTLMISRTPEVTCVVVDVSHEDPEVKFNWYVDGVEVHNAKTKPREEQYNSTYRVVSVLTVLHQDWLNGKEYKCKVSNKALPAPIEKTISKAKGQPREPQVYTLPPSRDELTKNQVSLTCLVKGFYPSDIAVEWESNGQPENNYKTTPPVLDSDGSFFLYSKLTVDKSRWQQGNVFSCSVMHEALHNHYTQKSLSLSPGKKDPKAAAIEVMYPPPYLDNEKSNGTIIHVKGKHLCPSPLFPGPSKPFWVLVVVGGVLACYSLLVTVAFIIFWVRSKRSRLLHSDYMNMTPRRPGPTRKHYQPYAPPRDFAAYRSRVKFSRSADAPAYQQGQNQLYNELNLGRREEYDVLDKRRGRDPEMGGKPRRKNPQEGLYNELQKDKMAEAYSEIGMKGERRRGKGHDGLYQGLSTATKDTYDALHMQALPPR

SEQ ID NO: 6839 - protein, 492 aa, Artificial Sequence
  source: /note="Description of Artificial Sequence: Synthetic Chimeric Antigen Receptor"
LLVTSLLLCELPHPAFLLIPDTQVQLQQSGAEVKKPGSSVKVSCKASGFSLTSYAISWVRQAPGQGLEWMGGIIWSGGATNYAQKFQGRVTITADESTSTAYMELSSLRSEDTAVYYCAREHYYGSSAMDYWWGQGTMVTVSSGGGGSGGGGSGGGGSEIVLTQSPATLSLSPGERATLSCRASQSIVHSYGNTYAWYQQKPGQAPRLLIYRVSRATGIPARFSGSGSGTDFTLTISSLEPEDFAVYYCFQGTHVPYTFFGQGTKLEIKRAAAIEVMYPPPYLDNEKSNGTIIHVKGKHLCPSPLFPGPSKPFWVLVVVGGVLACYSLLVTVAFIIFWVRSKRSRLLHSDYMNMTPRRPGPTRKHYQPYAPPRDFAAYRSRVKFSRSADAPAYQQGQNQLYNELNLGRREEYDVLDKRRGRDPEMGGKPRRKNPQEGLYNELQKDKMAEAYSEIGMKGERRRGKGHDGLYQGLSTATKDTYDALHMQALPPR

SEQ ID NO: 6840 - protein, 732 aa, Artificial Sequence [sequence omitted]

SEQ ID NO: 6841 - protein, 496 aa, Artificial Sequence
  source: /note="Description of Artificial Sequence: Synthetic Chimeric Antigen Receptor"
LLVTSLLLCELPHPAFLLIPDTQVQLQQSGAEVKKPGSSVKVSCKASGFSLTSYAISWVRQAPGQGLEWMGGIIWSGGATNYAQKFQGRVTITADESTSTAYMELSSLRSEDTAVYYCAREHYYGSSAMDYWWGQGTMVTVSSGGGGSGGGGSGGGGSEIVLTQSPATLSLSPGERATLSCRASQSIVHSYGNTYAWYQQKPGQAPRLLIYRVSRATGIPARFSGSGSGTDFTLTISSLEPEDFAVYYCFQGTHVPYTFFGQGTKLEIKRAAATTTPAPRPPTPAPTIASQPLSLRPEACRPAAGGAVHTRGLDFACDIYIWAPLAGTCGVLLLSLVITLYCKRGRKKLLYIFKQPFMRPVQTTQEEDGCSCRFPEEEEGGCELRVKFSRSADAPAYKQGQNQLYNELNLGRREEYDVLDKRRGRDPEMGGKPRRKNPQEGLYNELQKDKMAEAYSEIGMKGERRRGKGHDGLYQGLSTATKDTYDALHMQALPPR

SEQ ID NO: 6842 - protein, 792 aa, Artificial Sequence
  source: /note="Description of Artificial Sequence: Synthetic Chimeric Antigen Receptor"
LLVTSLLLCELPHPAFLLIPDTQVQLQQSGAEVKKPGSSVKVSCKASGFSLTSYAISWVRQAPGQGLEWMGGIIWSGGATNYAQKFQGRVTITADESTSTAYMELSSLRSEDTAVYYCAREHYYGSSAMDYWWGQGTMVTVSSGGGGSGGGGSGGGGSEIVLTQSPATLSLSPGERATLSCRASQSIVHSYGNTYAWYQQKPGQAPRLLIYRVSRATGIPARFSGSGSGTDFTLTISSLEPEDFAVYYCFQGTHVPYTFFGQGTKLEIKREPKSCDKTHTCPPCPAPELLGGPSVFLFPPKPKDTLMISRTPEVTCVVVDVSHEDPEVKFNWYVDGVEVHNAKTKPREEQYNSTYRVVSVLTVLHQDWLNGKEYKCKVSNKALPAPIEKTISKAKGQPREPQVYTLPPSRDELTKNQVSLTCLVKGFYPSDIAVEWESNGQPENNYKTTPPVLDSDGSFFLYSKLTVDKSRWQQGNVFSCSVMHEALHNHYTQKSLSLSPGKKDPKAAAFVPVFLPAKPTTTPAPRPPTPAPTIASQPLSLRPEACRPAAGGAVHTRGLDFACDIYIWAPLAGTCGVLLLSLVITLYCNHRNRSKRSRLLHSDYMNMTPRRPGPTRKHYQPYAPPRDFAAYRSRFSVVKRGRKKLLYIFKQPFMRPVQTTQEEDGCSCRFPEEEEGGCELRVKFSRSADAPAYQQGQNQLYNELNLGRREEYDVLDKRRGRDPEMGGKPRRKNPQEGLYNELQKDKMAEAYSEIGMKGERRRGKGHDGLYQGLSTATKDTYDALHMQALPPR

SEQ ID NO: 6843 - protein, 556 aa, Artificial Sequence
  source: /note="Description of Artificial Sequence: Synthetic Chimeric Antigen Receptor"
LLVTSLLLCELPHPAFLLIPDTQVQLQQSGAEVKKPGSSVKVSCKASGFSLTSYAISWVRQAPGQGLEWMGGIIWSGGATNYAQKFQGRVTITADESTSTAYMELSSLRSEDTAVYYCAREHYYGSSAMDYWWGQGTMVTVSSGGGGSGGGGSGGGGSEIVLTQSPATLSLSPGERATLSCRASQSIVHSYGNTYAWYQQKPGQAPRLLIYRVSRATGIPARFSGSGSGTDFTLTISSLEPEDFAVYYCFQGTHVPYTFFGQGTKLEIKRAAAFVPVFLPAKPTTTPAPRPPTPAPTIASQPLSLRPEACRPAAGGAVHTRGLDFACDIYIWAPLAGTCGVLLLSLVITLYCNHRNRSKRSRLLHSDYMNMTPRRPGPTRKHYQPYAPPRDFAAYRSRFSVVKRGRKKLLYIFKQPFMRPVQTTQEEDGCSCRFPEEEEGGCELRVKFSRSADAPAYQQGQNQLYNELNLGRREEYDVLDKRRGRDPEMGGKPRRKNPQEGLYNELQKDKMAEAYSEIGMKGERRRGKGHDGLYQGLSTATKDTYDALHMQALPPR

SEQ ID NO: 6844 - protein, 728 aa, Artificial Sequence
  source: /note="Description of Artificial Sequence: Synthetic Chimeric Antigen Receptor"
LLVTSLLLCELPHPAFLLIPDTQVQLQQSGAEVKKPGSSVKVSCKASGYAFSSYISWVRQAPGQGLEWMGGQIYPGDGDTNYAQKFQGRVTITADESTSTAYMELSSLRSEDTAVYYCVRYYYGSSGYFDYWWGQGTMVTVSSGGGGSGGGGSGGGGSEIVLTQSPATLSLSPGERATLSCRASESVDNYGISFAWYQQKPGQAPRLLIYRASRATGIPARFSGSGSGTDFTLTISSLEPEDFAVYYCQQNNKDPPTFFGQGTKLEIKRAEPKSCDKTHTCPPCPAPELLGGPSVFLFPPKPKDTLMISRTPEVTCVVVDVSHEDPEVKFNWYVDGVEVHNAKTKPREEQYNSTYRVVSVLTVLHQDWLNGKEYKCKVSNKALPAPIEKTISKAKGQPREPQVYTLPPSRDELTKNQVSLTCLVKGFYPSDIAVEWESNGQPENNYKTTPPVLDSDGSFFLYSKLTVDKSRWQQGNVFSCSVMHEALHNHYTQKSLSLSPGKKDPKAAAIEVMYPPPYLDNEKSNGTIIHVKGKHLCPSPLFPGPSKPFWVLVVVGGVLACYSLLVTVAFIIFWVRSKRSRLLHSDYMNMTPRRPGPTRKHYQPYAPPRDFAAYRSRVKFSRSADAPAYQQGQNQLYNELNLGRREEYDVLDKRRGRDPEMGGKPRRKNPQEGLYNELQKDKMAEAYSEIGMKGERRRGKGHDGLYQGLSTATKDTYDALHMQALPPR

SEQ ID NO: 6845 - protein, 491 aa, Artificial Sequence
  source: /note="Description of Artificial Sequence: Synthetic Chimeric Antigen Receptor"
LLVTSLLLCELPHPAFLLIPDTQVQLQQSGAEVKKPGSSVKVSCKASGYAFSSYISWVRQAPGQGLEWMGGQIYPGDGDTNYAQKFQGRVTITADESTSTAYMELSSLRSEDTAVYYCVRYYYGSSGYFDYWWGQGTMVTVSSGGGGSGGGGSGGGGSEIVLTQSPATLSLSPGERATLSCRASESVDNYGISFAWYQQKPGQAPRLLIYRASRATGIPARFSGSGSGTDFTLTISSLEPEDFAVYYCQQNNKDPPTFFGQGTKLEIKRAAAIEVMYPPPYLDNEKSNGTIIHVKGKHLCPSPLFPGPSKPFWVLVVVGGVLACYSLLVTVAFIIFWVRSKRSRLLHSDYMNMTPRRPGPTRKHYQPYAPPRDFAAYRSRVKFSRSADAPAYQQGQNQLYNELNLGRREEYDVLDKRRGRDPEMGGKPRRKNPQEGLYNELQKDKMAEAYSEIGMKGERRRGKGHDGLYQGLSTATKDTYDALHMQALPPR

SEQ ID NO: 6846 - protein, 732 aa, Artificial Sequence
  source: /note="Description of Artificial Sequence: Synthetic Chimeric Antigen Receptor"
LLVTSLLLCELPHPAFLLIPDTQVQLQQSGAEVKKPGSSVKVSCKASGYAFSSYISWVRQAPGQGLEWMGGQIYPGDGDTNYAQKFQGRVTITADESTSTAYMELSSLRSEDTAVYYCVRYYYGSSGYFDYWWGQGTMVTVSSGGGGSGGGGSGGGGSEIVLTQSPATLSLSPGERATLSCRASESVDNYGISFAWYQQKPGQAPRLLIYRASRATGIPARFSGSGSGTDFTLTISSLEPEDFAVYYCQQNNKDPPTFFGQGTKLEIKRAEPKSCDKTHTCPPCPAPELLGGPSVFLFPPKPKDTLMISRTPEVTCVVVDVSHEDPEVKFNWYVDGVEVHNAKTKPREEQYNSTYRVVSVLTVLHQDWLNGKEYKCKVSNKALPAPIEKTISKAKGQPREPQVYTLPPSRDELTKNQVSLTCLVKGFYPSDIAVEWESNGQPENNYKTTPPVLDSDGSFFLYSKLTVDKSRWQQGNVFSCSVMHEALHNHYTQKSLSLSPGKKDPKAAATTTPAPRPPTPAPTIASQPLSLRPEACRPAAGGAVHTRGLDFACDIYIWAPLAGTCGVLLLSLVITLYCKRGRKKLLYIFKQPFMRPVQTTQEEDGCSCRFPEEEEGGCELRVKFSRSADAPAYKQGQNQLYNELNLGRREEYDVLDKRRGRDPEMGGKPRRKNPQEGLYNELQKDKMAEAYSEIGMKGERRRGKGHDGLYQGLSTATKDTYDALHMQALPPR

SEQ ID NO: 6847 - protein, 495 aa, Artificial Sequence
  source: /note="Description of Artificial Sequence: Synthetic Chimeric Antigen Receptor"
LLVTSLLLCELPHPAFLLIPDTQVQLQQSGAEVKKPGSSVKVSCKASGYAFSSYISWVRQAPGQGLEWMGGQIYPGDGDTNYAQKFQGRVTITADESTSTAYMELSSLRSEDTAVYYCVRYYYGSSGYFDYWWGQGTMVTVSSGGGGSGGGGSGGGGSEIVLTQSPATLSLSPGERATLSCRASESVDNYGISFAWYQQKPGQAPRLLIYRASRATGIPARFSGSGSGTDFTLTISSLEPEDFAVYYCQQNNKDPPTFFGQGTKLEIKRAAATTTPAPRPPTPAPTIASQPLSLRPEACRPAAGGAVHTRGLDFACDIYIWAPLAGTCGVLLLSLVITLYCKRGRKKLLYIFKQPFMRPVQTTQEEDGCSCRFPEEEEGGCELRVKFSRSADAPAYKQGQNQLYNELNLGRREEYDVLDKRRGRDPEMGGKPRRKNPQEGLYNELQKDKMAEAYSEIGMKGERRRGKGHDGLYQGLSTATKDTYDALHMQALPPR

SEQ ID NO: 6848 - protein, 792 aa, Artificial Sequence
  source: /note="Description of Artificial Sequence: Synthetic Chimeric Antigen Receptor"
LLVTSLLLCELPHPAFLLIPDTQVQLQQSGAEVKKPGSSVKVSCKASGYAFSSYISWVRQAPGQGLEWMGGQIYPGDGDTNYAQKFQGRVTITADESTSTAYMELSSLRSEDTAVYYCVRYYYGSSGYFDYWWGQGTMVTVSSGGGGSGGGGSGGGGSEIVLTQSPATLSLSPGERATLSCRASESVDNYGISFAWYQQKPGQAPRLLIYRASRATGIPARFSGSGSGTDFTLTISSLEPEDFAVYYCQQNNKDPPTFFGQGTKLEIKRAEPKSCDKTHTCPPCPAPELLGGPSVFLFPPKPKDTLMISRTPEVTCVVVDVSHEDPEVKFNWYVDGVEVHNAKTKPREEQYNSTYRVVSVLTVLHQDWLNGKEYKCKVSNKALPAPIEKTISKAKGQPREPQVYTLPPSRDELTKNQVSLTCLVKGFYPSDIAVEWESNGQPENNYKTTPPVLDSDGSFFLYSKLTVDKSRWQQGNVFSCSVMHEALHNHYTQKSLSLSPGKKDPKAAAFVPVFLPAKPTTTPAPRPPTPAPTIASQPLSLRPEACRPAAGGAVHTRGLDFACDIYIWAPLAGTCGVLLLSLVITLYCNHRNRSKRSRLLHSDYMNMTPRRPGPTRKHYQPYAPPRDFAAYRSRFSVVKRGRKKLLYIFKQPFMRPVQTTQEEDGCSCRFPEEEEGGCELRVKFSRSADAPAYQQGQNQLYNELNLGRREEYDVLDKRRGRDPEMGGKPRRKNPQEGLYNELQKDKMAEAYSEIGMKGERRRGKGHDGLYQGLSTATKDTYDALHMQALPPR

SEQ ID NO: 6849 - protein, 555 aa, Artificial Sequence
  source: /note="Description of Artificial Sequence: Synthetic Chimeric Antigen Receptor"
LLVTSLLLCELPHPAFLLIPDTQVQLQQSGAEVKKPGSSVKVSCKASGYAFSSYISWVRQAPGQGLEWMGGQIYPGDGDTNYAQKFQGRVTITADESTSTAYMELSSLRSEDTAVYYCVRYYYGSSGYFDYWWGQGTMVTVSSGGGGSGGGGSGGGGSEIVLTQSPATLSLSPGERATLSCRASESVDNYGISFAWYQQKPGQAPRLLIYRASRATGIPARFSGSGSGTDFTLTISSLEPEDFAVYYCQQNNKDPPTFFGQGTKLEIKRAAAFVPVFLPAKPTTTPAPRPPTPAPTIASQPLSLRPEACRPAAGGAVHTRGLDFACDIYIWAPLAGTCGVLLLSLVITLYCNHRNRSKRSRLLHSDYMNMTPRRPGPTRKHYQPYAPPRDFAAYRSRFSVVKRGRKKLLYIFKQPFMRPVQTTQEEDGCSCRFPEEEEGGCELRVKFSRSADAPAYQQGQNQLYNELNLGRREEYDVLDKRRGRDPEMGGKPRRKNPQEGLYNELQKDKMAEAYSEIGMKGERRRGKGHDGLYQGLSTATKDTYDALHMQALPPR

SEQ ID NO: 6850 - protein, 726 aa, Artificial Sequence
  source: /note="Description of Artificial Sequence: Synthetic Chimeric Antigen Receptor"
LLVTSLLLCELPHPAFLLIPDTQVQLQQSGAEVKKPGSSVKVSCKASGYTFTDHFISWVRQAPGQGLEWMGGLNPYSGGTNYAQKFQGRVTITADESTSTAYMELSSLRSEDTAVYYCARHNWGAYFDYWWGQGTMVTVSSGGGGSGGGGSGGGGSEIVLTQSPATLSLSPGERATLSCRASKSLLHSNGNTYAWYQQKPGQAPRLLIYYMSRATGIPARFSGSGSGTDFTLTISSLEPEDFAVYYCMQGLEDPYTFFGQGTKLEIKREPKSCDKTHTCPPCPAPELLGGPSVFLFPPKPKDTLMISRTPEVTCVVVDVSHEDPEVKFNWYVDGVEVHNAKTKPREEQYNSTYRVVSVLTVLHQDWLNGKEYKCKVSNKALPAPIEKTISKAKGQPREPQVYTLPPSRDELTKNQVSLTCLVKGFYPSDIAVEWESNGQPENNYKTTPPVLDSDGSFFLYSKLTVDKSRWQQGNVFSCSVMHEALHNHYTQKSLSLSPGKKDPKAAAIEVMYPPPYLDNEKSNGTIIHVKGKHLCPSPLFPGPSKPFWVLVVVGGVLACYSLLVTVAFIIFWVRSKRSRLLHSDYMNMTPRRPGPTRKHYQPYAPPRDFAAYRSRVKFSRSADAPAYQQGQNQLYNELNLGRREEYDVLDKRRGRDPEMGGKPRRKNPQEGLYNELQKDKMAEAYSEIGMKGERRRGKGHDGLYQGLSTATKDTYDALHMQALPPR

SEQ ID NO: 6851 - protein, 490 aa, Artificial Sequence
  source: /note="Description of Artificial Sequence: Synthetic Chimeric Antigen Receptor"
LLVTSLLLCELPHPAFLLIPDTQVQLQQSGAEVKKPGSSVKVSCKASGYTFTDHFISWVRQAPGQGLEWMGGLNPYSGGTNYAQKFQGRVTITADESTSTAYMELSSLRSEDTAVYYCARHNWGAYFDYWWGQGTMVTVSSGGGGSGGGGSGGGGSEIVLTQSPATLSLSPGERATLSCRASKSLLHSNGNTYAWYQQKPGQAPRLLIYYMSRATGIPARFSGSGSGTDFTLTISSLEPEDFAVYYCMQGLEDPYTFFGQGTKLEIKRAAAIEVMYPPPYLDNEKSNGTIIHVKGKHLCPSPLFPGPSKPFWVLVVVGGVLACYSLLVTVAFIIFWVRSKRSRLLHSDYMNMTPRRPGPTRKHYQPYAPPRDFAAYRSRVKFSRSADAPAYQQGQNQLYNELNLGRREEYDVLDKRRGRDPEMGGKPRRKNPQEGLYNELQKDKMAEAYSEIGMKGERRRGKGHDGLYQGLSTATKDTYDALHMQALPPR

SEQ ID NO: 6852 - protein, 730 aa, Artificial Sequence
  source: /note="Description of Artificial Sequence: Synthetic Chimeric Antigen Receptor"
LLVTSLLLCELPHPAFLLIPDTQVQLQQSGAEVKKPGSSVKVSCKASGYTFTDHFISWVRQAPGQGLEWMGGLNPYSGGTNYAQKFQGRVTITADESTSTAYMELSSLRSEDTAVYYCARHNWGAYFDYWWGQGTMVTVSSGGGGSGGGGSGGGGSEIVLTQSPATLSLSPGERATLSCRASKSLLHSNGNTYAWYQQKPGQAPRLLIYYMSRATGIPARFSGSGSGTDFTLTISSLEPEDFAVYYCMQGLEDPYTFFGQGTKLEIKREPKSCDKTHTCPPCPAPELLGGPSVFLFPPKPKDTLMISRTPEVTCVVVDVSHEDPEVKFNWYVDGVEVHNAKTKPREEQYNSTYRVVSVLTVLHQDWLNGKEYKCKVSNKALPAPIEKTISKAKGQPREPQVYTLPPSRDELTKNQVSLTCLVKGFYPSDIAVEWESNGQPENNYKTTPPVLDSDGSFFLYSKLTVDKSRWQQGNVFSCSVMHEALHNHYTQKSLSLSPGKKDPKAAATTTPAPRPPTPAPTIASQPLSLRPEACRPAAGGAVHTRGLDFACDIYIWAPLAGTCGVLLLSLVITLYCKRGRKKLLYIFKQPFMRPVQTTQEEDGCSCRFPEEEEGGCELRVKFSRSADAPAYKQGQNQLYNELNLGRREEYDVLDKRRGRDPEMGGKPRRKNPQEGLYNELQKDKMAEAYSEIGMKGERRRGKGHDGLYQGLSTATKDTYDALHMQALPPR

SEQ ID NO: 6853 - protein, 494 aa, Artificial Sequence
  source: /note="Description of Artificial Sequence: Synthetic Chimeric Antigen Receptor"
LLVTSLLLCELPHPAFLLIPDTQVQLQQSGAEVKKPGSSVKVSCKASGYTFTDHFISWVRQAPGQGLEWMGGLNPYSGGTNYAQKFQGRVTITADESTSTAYMELSSLRSEDTAVYYCARHNWGAYFDYWWGQGTMVTVSSGGGGSGGGGSGGGGSEIVLTQSPATLSLSPGERATLSCRASKSLLHSNGNTYAWYQQKPGQAPRLLIYYMSRATGIPARFSGSGSGTDFTLTISSLEPEDFAVYYCMQGLEDPYTFFGQGTKLEIKRAAATTTPAPRPPTPAPTIASQPLSLRPEACRPAAGGAVHTRGLDFACDIYIWAPLAGTCGVLLLSLVITLYCKRGRKKLLYIFKQPFMRPVQTTQEEDGCSCRFPEEEEGGCELRVKFSRSADAPAYKQGQNQLYNELNLGRREEYDVLDKRRGRDPEMGGKPRRKNPQEGLYNELQKDKMAEAYSEIGMKGERRRGKGHDGLYQGLSTATKDTYDALHMQALPPR

SEQ ID NO: 6854 - protein, 790 aa, Artificial Sequence
  source: /note="Description of Artificial Sequence: Synthetic Chimeric Antigen Receptor"
LLVTSLLLCELPHPAFLLIPDTQVQLQQSGAEVKKPGSSVKVSCKASGYTFTDHFISWVRQAPGQGLEWMGGLNPYSGGTNYAQKFQGRVTITADESTSTAYMELSSLRSEDTAVYYCARHNWGAYFDYWWGQGTMVTVSSGGGGSGGGGSGGGGSEIVLTQSPATLSLSPGERATLSCRASKSLLHSNGNTYAWYQQKPGQAPRLLIYYMSRATGIPARFSGSGSGTDFTLTISSLEPEDFAVYYCMQGLEDPYTFFGQGTKLEIKREPKSCDKTHTCPPCPAPELLGGPSVFLFPPKPKDTLMISRTPEVTCVVVDVSHEDPEVKFNWYVDGVEVHNAKTKPREEQYNSTYRVVSVLTVLHQDWLNGKEYKCKVSNKALPAPIEKTISKAKGQPREPQVYTLPPSRDELTKNQVSLTCLVKGFYPSDIAVEWESNGQPENNYKTTPPVLDSDGSFFLYSKLTVDKSRWQQGNVFSCSVMHEALHNHYTQKSLSLSPGKKDPKAAAFVPVFLPAKPTTTPAPRPPTPAPTIASQPLSLRPEACRPAAGGAVHTRGLDFACDIYIWAPLAGTCGVLLLSLVITLYCNHRNRSKRSRLLHSDYMNMTPRRPGPTRKHYQPYAPPRDFAAYRSRFSVVKRGRKKLLYIFKQPFMRPVQTTQEEDGCSCRFPEEEEGGCELRVKFSRSADAPAYQQGQNQLYNELNLGRREEYDVLDKRRGRDPEMGGKPRRKNPQEGLYNELQKDKMAEAYSEIGMKGERRRGKGHDGLYQGLSTATKDTYDALHMQALPPR

SEQ ID NO: 6855 - protein, 554 aa, Artificial Sequence
  source: /note="Description of Artificial Sequence: Synthetic Chimeric Antigen Receptor"
LLVTSLLLCELPHPAFLLIPDTQVQLQQSGAEVKKPGSSVKVSCKASGYTFTDHFISWVRQAPGQGLEWMGGLNPYSGGTNYAQKFQGRVTITADESTSTAYMELSSLRSEDTAVYYCARHNWGAYFDYWWGQGTMVTVSSGGGGSGGGGSGGGGSEIVLTQSPATLSLSPGERATLSCRASKSLLHSNGNTYAWYQQKPGQAPRLLIYYMSRATGIPARFSGSGSGTDFTLTISSLEPEDFAVYYCMQGLEDPYTFFGQGTKLEIKRAAAFVPVFLPAKPTTTPAPRPPTPAPTIASQPLSLRPEACRPAAGGAVHTRGLDFACDIYIWAPLAGTCGVLLLSLVITLYCNHRNRSKRSRLLHSDYMNMTPRRPGPTRKHYQPYAPPRDFAAYRSRFSVVKRGRKKLLYIFKQPFMRPVQTTQEEDGCSCRFPEEEEGGCELRVKFSRSADAPAYQQGQNQLYNELNLGRREEYDVLDKRRGRDPEMGGKPRRKNPQEGLYNELQKDKMAEAYSEIGMKGERRRGKGHDGLYQGLSTATKDTYDALHMQALPPR

SEQ ID NO: 6856 - protein, 724 aa, Artificial Sequence
  source: /note="Description of Artificial Sequence: Synthetic Chimeric Antigen Receptor"
LLVTSLLLCELPHPAFLLIPDTQVQLQQSGAEVKKPGSSVKVSCKASGYTFTDYEISWVRQAPGQGLEWMGGIDPETGGTNYAQKFQGRVTITADESTSTAYMELSSLRSEDTAVYYCARRRYYGSSSFDYWWGQGTMVTVSSGGGGSGGGGSGGGGSEIVLTQSPATLSLSPGERATLSCRASQDIGNYAWYQQKPGQAPRLLIYYTSRATGIPARFSGSGSGTDFTLTISSLEPEDFAVYYCQQGSALPPTFFGQGTKLEIKRAEPKSCDKTHTCPPCPAPELLGGPSVFLFPPKPKDTLMISRTPEVTCVVVDVSHEDPEVKFNWYVDGVEVHNAKTKPREEQYNSTYRVVSVLTVLHQDWLNGKEYKCKVSNKALPAPIEKTISKAKGQPREPQVYTLPPSRDELTKNQVSLTCLVKGFYPSDIAVEWESNGQPENNYKTTPPVLDSDGSFFLYSKLTVDKSRWQQGNVFSCSVMHEALHNHYTQKSLSLSPGKKDPKAAAIEVMYPPPYLDNEKSNGTIIHVKGKHLCPSPLFPGPSKPFWVLVVVGGVLACYSLLVTVAFIIFWVRSKRSRLLHSDYMNMTPRRPGPTRKHYQPYAPPRDFAAYRSRVKFSRSADAPAYQQGQNQLYNELNLGRREEYDVLDKRRGRDPEMGGKPRRKNPQEGLYNELQKDKMAEAYSEIGMKGERRRGKGHDGLYQGLSTATKDTYDALHMQALPPR

SEQ ID NO: 6857 - protein, 487 aa, Artificial Sequence
  source: /note="Description of Artificial Sequence: Synthetic Chimeric Antigen Receptor"
LLVTSLLLCELPHPAFLLIPDTQVQLQQSGAEVKKPGSSVKVSCKASGYTFTDYEISWVRQAPGQGLEWMGGIDPETGGTNYAQKFQGRVTITADESTSTAYMELSSLRSEDTAVYYCARRRYYGSSSFDYWWGQGTMVTVSSGGGGSGGGGSGGGGSEIVLTQSPATLSLSPGERATLSCRASQDIGNYAWYQQKPGQAPRLLIYYTSRATGIPARFSGSGSGTDFTLTISSLEPEDFAVYYCQQGSALPPTFFGQGTKLEIKRAAAIEVMYPPPYLDNEKSNGTIIHVKGKHLCPSPLFPGPSKPFWVLVVVGGVLACYSLLVTVAFIIFWVRSKRSRLLHSDYMNMTPRRPGPTRKHYQPYAPPRDFAAYRSRVKFSRSADAPAYQQGQNQLYNELNLGRREEYDVLDKRRGRDPEMGGKPRRKNPQEGLYNELQKDKMAEAYSEIGMKGERRRGKGHDGLYQGLSTATKDTYDALHMQALPPR

SEQ ID NO: 6858 - protein, 728 aa, Artificial Sequence
  source: /note="Description of Artificial Sequence: Synthetic Chimeric Antigen Receptor"
LLVTSLLLCELPHPAFLLIPDTQVQLQQSGAEVKKPGSSVKVSCKASGYTFTDYEISWVRQAPGQGLEWMGGIDPETGGTNYAQKFQGRVTITADESTSTAYMELSSLRSEDTAVYYCARRRYYGSSSFDYWWGQGTMVTVSSGGGGSGGGGSGGGGSEIVLTQSPATLSLSPGERATLSCRASQDIGNYAWYQQKPGQAPRLLIYYTSRATGIPARFSGSGSGTDFTLTISSLEPEDFAVYYCQQGSALPPTFFGQGTKLEIKRAEPKSCDKTHTCPPCPAPELLGGPSVFLFPPKPKDTLMISRTPEVTCVVVDVSHEDPEVKFNWYVDGVEVHNAKTKPREEQYNSTYRVVSVLTVLHQDWLNGKEYKCKVSNKALPAPIEKTISKAKGQPREPQVYTLPPSRDELTKNQVSLTCLVKGFYPSDIAVEWESNGQPENNYKTTPPVLDSDGSFFLYSKLTVDKSRWQQGNVFSCSVMHEALHNHYTQKSLSLSPGKKDPKAAATTTPAPRPPTPAPTIASQPLSLRPEACRPAAGGAVHTRGLDFACDIYIWAPLAGTCGVLLLSLVITLYCKRGRKKLLYIFKQPFMRPVQTTQEEDGCSCRFPEEEEGGCELRVKFSRSADAPAYKQGQNQLYNELNLGRREEYDVLDKRRGRDPEMGGKPRRKNPQEGLYNELQKDKMAEAYSEIGMKGERRRGKGHDGLYQGLSTATKDTYDALHMQALPPR

SEQ ID NO: 6859 - protein, 491 aa, Artificial Sequence
  source: /note="Description of Artificial Sequence: Synthetic Chimeric Antigen Receptor"
LLVTSLLLCELPHPAFLLIPDTQVQLQQSGAEVKKPGSSVKVSCKASGYTFTDYEISWVRQAPGQGLEWMGGIDPETGGTNYAQKFQGRVTITADESTSTAYMELSSLRSEDTAVYYCARRRYYGSSSFDYWWGQGTMVTVSSGGGGSGGGGSGGGGSEIVLTQSPATLSLSPGERATLSCRASQDIGNYAWYQQKPGQAPRLLIYYTSRATGIPARFSGSGSGTDFTLTISSLEPEDFAVYYCQQGSALPPTFFGQGTKLEIKRAAATTTPAPRPPTPAPTIASQPLSLRPEACRPAAGGAVHTRGLDFACDIYIWAPLAGTCGVLLLSLVITLYCKRGRKKLLYIFKQPFMRPVQTTQEEDGCSCRFPEEEEGGCELRVKFSRSADAPAYKQGQNQLYNELNLGRREEYDVLDKRRGRDPEMGGKPRRKNPQEGLYNELQKDKMAEAYSEIGMKGERRRGKGHDGLYQGLSTATKDTYDALHMQALPPR

SEQ ID NO: 6860 - protein, 788 aa, Artificial Sequence [sequence omitted]

SEQ ID NO: 6861 - protein, 551 aa, Artificial Sequence
  source: /note="Description of Artificial Sequence: Synthetic Chimeric Antigen Receptor"
LLVTSLLLCELPHPAFLLIPDTQVQLQQSGAEVKKPGSSVKVSCKASGYTFTDYEISWVRQAPGQGLEWMGGIDPETGGTNYAQKFQGRVTITADESTSTAYMELSSLRSEDTAVYYCARRRYYGSSSFDYWWGQGTMVTVSSGGGGSGGGGSGGGGSEIVLTQSPATLSLSPGERATLSCRASQDIGNYAWYQQKPGQAPRLLIYYTSRATGIPARFSGSGSGTDFTLTISSLEPEDFAVYYCQQGSALPPTFFGQGTKLEIKRAAAFVPVFLPAKPTTTPAPRPPTPAPTIASQPLSLRPEACRPAAGGAVHTRGLDFACDIYIWAPLAGTCGVLLLSLVITLYCNHRNRSKRSRLLHSDYMNMTPRRPGPTRKHYQPYAPPRDFAAYRSRFSVVKRGRKKLLYIFKQPFMRPVQTTQEEDGCSCRFPEEEEGGCELRVKFSRSADAPAYQQGQNQLYNELNLGRREEYDVLDKRRGRDPEMGGKPRRKNPQEGLYNELQKDKMAEAYSEIGMKGERRRGKGHDGLYQGLSTATKDTYDALHMQALPPR

SEQ ID NO: 6862 - protein, 493 aa, Artificial Sequence
  source: /note="Description of Artificial Sequence: Synthetic Chimeric Antigen Receptor"
MALPVTALLLPLALLLHAARPDIVLTQSPPSLAMSLGKRATISCRASESVTILGSHLIHWYQQKPGQPPTLLIQLASNVQTGVPARFSGSGSRTDFTLTIDPVEEDDVAVYYCLQSRTIPRTFGGGTKLEIKGSTSGSGKPGSGEGSTKGQIQLVQSGPELKKPGETVKISCKASGYTFTDYSINWVKRAPGKGLKWMGWINTETREPAYAYDFRGRFAFSLETSASTAYLQINNLKYEDTATYFCALDYSYAMDYWGQGTSVTVSSAAATTTPAPRPPTPAPTIASQPLSLRPEACRPAAGGAVHTRGLDFACDIYIWAPLAGTCGVLLLSLVITLYCKRGRKKLLYIFKQPFMRPVQTTQEEDGCSCRFPEEEEGGCELRVKFSRSADAPAYQQGQNQLYNELNLGRREEYDVLDKRRGRDPEMGGKPRRKNPQEGLYNELQKDKMAEAYSEIGMKGERRRGKGHDGLYQGLSTATKDTYDALHMQALPPR

SEQ ID NO: 6863 - protein, 398 aa, Artificial Sequence
  source: /note="Description of Artificial Sequence: Synthetic Chimeric Antigen Receptor"
METDTLLLWVLLLWVPGSTGSVLHLVPINATSKDDSDVTEVMWQPALRRGRGLQAQGYGVRIQDAGVYLLYSQVLFQDVTFTMGQVVSREGQGRQETLFRCIRSMPSHPDRAYNSCYSAGVFHLHQGDILSVIIPRARAKLNLSPHGTFLGFVKLSGGGSDPAEPKSPDKTHTCPPCPKDPKFWVLVVVGGVLACYSLLVTVAFIIFWVRSKRSRLLHSDYMNMTPRRPGPTRKHYQPYAPPRDFAAYRSRDQRLPPDAHKPPGGGSFRTPIQEEQADAHSTLAKIRVKFSRSADAPAYQQGQNQLYNELNLGRREEYDVLDKRRGRDPEMGGKPRRKNPQEGLYNELQKDKMAEAYSEIGMKGERRRGKGHDGLYQGLSTATKDTYDALHMQALPPR

SEQ ID NO: 6864 - protein, 614 aa, Artificial Sequence
  source: /note="Description of Artificial Sequence: Synthetic Chimeric Antigen Receptor"
METDTLLLWVLLLWVPGSTGSVLHLVPINATSKDDSDVTEVMWQPALRRGRGLQAQGYGVRIQDAGVYLLYSQVLFQDVTFTMGQVVSREGQGRQETLFRCIRSMPSHPDRAYNSCYSAGVFHLHQGDILSVIIPRARAKLNLSPHGTFLGFVKLSGGGSDPAEPKSPDKTHTCPPCPAPPVAGPSVFLFPPKPKDTLMIARTPEVTCVVVDVSHEDPEVKFNWYVDGVEVHNAKTKPREEQYNSTYRVVSVLTVLHQDWLNGKEYKCKVSNKALPAPIEKTISKAKGQPREPQVYTLPPSRDELTKNQVSLTCLVKGFYPSDIAVEWESNGQPENNYKTTPPVLDSDGSFFLYSKLTVDKSRWQQGNVFSCSVMHEALHNHYTQKSLSLSPGKKDPKFWVLVVVGGVLACYSLLVTVAFIIFWVRSKRSRLLHSDYMNMTPRRPGPTRKHYQPYAPPRDFAAYRSRDQRLPPDAHKPPGGGSFRTPIQEEQADAHSTLAKIRVKFSRSADAPAYQQGQNQLYNELNLGRREEYDVLDKRRGRDPEMGGKPRRKNPQEGLYNELQKDKMAEAYSEIGMKGERRRGKGHDGLYQGLSTATKDTYDALHMQALPPR

SEQ ID NO: 6865 - protein, 482 aa, Artificial Sequence; identical to SEQ ID NO: 6814
  source: /note="Description of Artificial Sequence: Synthetic Chimeric Antigen Receptor"

SEQ ID NO: 6866 - protein, 493 aa, Artificial Sequence
  source: /note="Description of Artificial Sequence: Synthetic Chimeric Antigen Receptor"
MALPVTALLLPLALLLHAARPQVQLVQSGAEVRKTGASVKVSCKASGYIFDNFGINWVRQAPGQGLEWMGWINPKNNNTNYAQKFQGRVTITADESTNTAYMEVSSLRSEDTAVYYCARGPYYYQSYMDVWGQGTMVTVSSASGGGGSGGRASGGGGSDIVMTQTPLSLPVTPGEPASISCRSSQSLLHSNGYNYLNWYLQKPGQSPQLLIYLGSKRASGVPDRFSGSGSGTDFTLHITRVGAEDVGVYYCMQALQTPYTFGQGTKLEIKTTTPAPRPPTPAPTIASQPLSLRPEACRPAAGGAVHTRGLDFACDIYIWAPLAGTCGVLLLSLVITLYCKRGRKKLLYIFKQPFMRPVQTTQEEDGCSCRFPEEEEGGCELRVKFSRSADAPAYKQGQNQLYNELNLGRREEYDVLDKRRGRDPEMGGKPRRKNPQEGLYNELQKDKMAEAYSEIGMKGERRRGKGHDGLYQGLSTATKDTYDALHMQALPPR

SEQ ID NO: 6867 - protein, 489 aa, Artificial Sequence
  source: /note="Description of Artificial Sequence: Synthetic Chimeric Antigen Receptor"
MALPVTALLLPLALLLHAARPQVQLQESGGGLVQPGGSLRLSCAASGFTFSSDAMTWVRQAPGKGLEWVSVISGSGGTTYYADSVKGRFTISRDNSKNTLYLQMNSLRAEDTAVYYCAKLDSSGYYYARGPRYWGQGTLVTVSSASGGGGSGGRASGGGGSDIQLTQSPSSLSASVGDRVTITCRASQSISSYLNWYQQKPGKAPKLLIYGASTLASGVPARFSGSGSGTHFTLTINSLQSEDSATYYCQQSYKRAFGQGTKVEIKTTTPAPRPPTPAPTIASQPLSLRPEACRPAAGGAVHTRGLDFACDIYIWAPLAGTCGVLLLSLVITLYCKRGRKKLLYIFKQPFMRPVQTTQEEDGCSCRFPEEEEGGCELRVKFSRSADAPAYKQGQNQLYNELNLGRREEYDVLDKRRGRDPEMGGKPRRKNPQEGLYNELQKDKMAEAYSEIGMKGERRRGKGHDGLYQGLSTATKDTYDALHMQALPPR

SEQ ID NO: 6868 - protein, 491 aa, Artificial Sequence
  source: /note="Description of Artificial Sequence: Synthetic Chimeric Antigen Receptor"
MALPVTALLLPLALLLHAARPQVQLVQSGAEVKKPGASVKVSCKASGYTFSNYGITWVRQAPGQGLEWMGWISAYNGNTNYAQKFQGRVTMTRNTSISTAYMELSSLRSEDTAVYYCARGPYYYYMDVWGKGTMVTVSSASGGGGSGGRASGGGGSEIVMTQSPLSLPVTPGEPASISCRSSQSLLYSNGYNYVDWYLQKPGQSPQLLIYLGSNRASGVPDRFSGSGSGTDFKLQISRVEAEDVGIYYCMQGRQFPYSFGQGTKVEIKTTTPAPRPPTPAPTIASQPLSLRPEACRPAAGGAVHTRGLDFACDIYIWAPLAGTCGVLLLSLVITLYCKRGRKKLLYIFKQPFMRPVQTTQEEDGCSCRFPEEEEGGCELRVKFSRSADAPAYKQGQNQLYNELNLGRREEYDVLDKRRGRDPEMGGKPRRKNPQEGLYNELQKDKMAEAYSEIGMKGERRRGKGHDGLYQGLSTATKDTYDALHMQALPPR

SEQ ID NO: 6869 - protein, 489 aa, Artificial Sequence
  source: /note="Description of Artificial Sequence: Synthetic Chimeric Antigen Receptor"
MALPVTALLLPLALLLHAARPQVQLVESGGGLVQPGRSLRLSCAASGFTFSNYAMSWVRQAPGKGLGWVSGISRSGENTYYADSVKGRFTISRDNSKNTLYLQMNSLRDEDTAVYYCARSPAHYYGGMDVWGQGTTVTVSSASGGGGSGGRASGGGGSDIVLTQSPGTLSLSPGERATLSCRASQSISSSFLWYQQKPGQAPRLLIYGASRRATGIPDRFSGSGSGTDFTLTISRLEPEDSAVYYCQQYHSSPSWIFGQGTKLEIKTTTPAPRPPTPAPTIASQPLSLRPEACRPAAGGAVHTRGLDFACDIYIWAPLAGTCGVLLLSLVITLYCKRGRKKLLYIFKQPFMRPVQTTQEEDGCSCRFPEEEEGGCELRVKFSRSADAPAYKQGQNQLYNELNLGRREEYDVLDKRRGRDPEMGGKPRRKNPQEGLYNELQKDKMAEAYSEIGMKGERRRGKGHDGLYQGLSTATKDTYDALHMQALPPR

SEQ ID NO: 6870 - protein, 488 aa, Artificial Sequence
  source: /note="Description of Artificial Sequence: Synthetic Chimeric Antigen Receptor"
MALPVTALLLPLALLLHAARPQVQLVESGGGLVQPGRSLRLSCAASGFTFDDYAMHWVRQAPGKGLEWVSGISWNSGSIGYADSVKGRFTISRDNAKNSLYLQMNSLRAEDTALYYCSVHSFLAYWGQGTLVTVSSASGGGGSGGRASGGGGSDIVMTQTPLSLPVTPGEPASISCRSSQSLLHSNGYNYLDWYLQKPGQSPQLLIYLGSNRASGVPDRFSGSGSGTDFTLKISRVEAEDVGVYYCMQALQTPYTFGQGTKVEIKTTTPAPRPPTPAPTIASQPLSLRPEACRPAAGGAVHTRGLDFACDIYIWAPLAGTCGVLLLSLVITLYCKRGRKKLLYIFKQPFMRPVQTTQEEDGCSCRFPEEEEGGCELRVKFSRSADAPAYKQGQNQLYNELNLGRREEYDVLDKRRGRDPEMGGKPRRKNPQEGLYNELQKDKMAEAYSEIGMKGERRRGKGHDGLYQGLSTATKDTYDALHMQALPPR

SEQ ID NO: 6871 - protein, 483 aa, Artificial Sequence
  source: /note="Description of Artificial Sequence: Synthetic Chimeric Antigen Receptor"
MALPVTALLLPLALLLHAARPEVQLVETGGGLVQPGGSLRLSCAVSGFALSNHGMSWVRRAPGKGLEWVSGIVYSGSTYYAASVKGRFTISRDNSRNTLYLQMNSLRPEDTAIYYCSAHGGESDVWGQGTTVTVSSASGGGGSGGRASGGGGSEIVMTQSPATLSVSPGERATLSCRASQSVSSKLAWYQQKPGQAPRLLMYGASIRATGIPDRFSGSGSGTEFTLTISSLEPEDFAVYYCQQYGSSSWTFGQGTKVEIKTTTPAPRPPTPAPTIASQPLSLRPEACRPAAGGAVHTRGLDFACDIYIWAPLAGTCGVLLLSLVITLYCKRGRKKLLYIFKQPFMRPVQTTQEEDGCSCRFPEEEEGGCELRVKFSRSADAPAYKQGQNQLYNELNLGRREEYDVLDKRRGRDPEMGGKPRRKNPQEGLYNELQKDKMAEAYSEIGMKGERRRGKGHDGLYQGLSTATKDTYDALHMQALPPR

SEQ ID NO: 6872 - protein, 485 aa, Artificial Sequence
  source: /note="Description of Artificial Sequence: Synthetic Chimeric Antigen Receptor"
MALPVTALLLPLALLLHAARPEVQLVETGGGVVQPGGSLRLSCAVSGFALSNHGMSWVRRAPGKGLEWVSGIVYSGSTYYAASVKGRFTISRDNSRNTLYLQMNSLRPEDTAIYYCSAHGGESDVWGQGTTVTVSSASGGGGSGGRASGGGGSEIVLTQSPGTLSLSPGERATLSCRASQSVGSTNLAWYQQKPGQAPRLLIYDASNRATGIPDRFSGGGSGTDFTLTISRLEPEDFAVYYCQQYGSSPPWTFGQGTKVEIKTTTPAPRPPTPAPTIASQPLSLRPEACRPAAGGAVHTRGLDFACDIYIWAPLAGTCGVLLLSLVITLYCKRGRKKLLYIFKQPFMRPVQTTQEEDGCSCRFPEEEEGGCELRVKFSRSADAPAYKQGQNQLYNELNLGRREEYDVLDKRRGRDPEMGGKPRRKNPQEGLYNELQKDKMAEAYSEIGMKGERRRGKGHDGLYQGLSTATKDTYDALHMQALPPR

SEQ ID NO: 6873 - protein, 483 aa, Artificial Sequence
  source: /note="Description of Artificial Sequence: Synthetic Chimeric Antigen Receptor"
MALPVTALLLPLALLLHAARPQVQLVESGGGLVKPGGSLRLSCAASGFTFSDYYMSWIRQAPGKGLEWVSYISSSGSTIYYADSVKGRFTISRDNAKNSLYLQMNSLRAEDTAVYYCARESGDGMDVWGQGTTVTVSSASGGGGSGGRASGGGGSDIQMTQSPSSLSASVGDRVTITCRASQSISSYLNWYQQKPGKAPKLLIYAASSLQSGVPSRFSGSGSGTDFTLTISSLQPEDFATYYCQQSYTLAFGQGTKVDIKTTTPAPRPPTPAPTIASQPLSLRPEACRPAAGGAVHTRGLDFACDIYIWAPLAGTCGVLLLSLVITLYCKRGRKKLLYIFKQPFMRPVQTTQEEDGCSCRFPEEEEGGCELRVKFSRSADAPAYKQGQNQLYNELNLGRREEYDVLDKRRGRDPEMGGKPRRKNPQEGLYNELQKDKMAEAYSEIGMKGERRRGKGHDGLYQGLSTATKDTYDALHMQALPPR

SEQ ID NO: 6874 - protein, 483 aa, Artificial Sequence
  source: /note="Description of Artificial Sequence: Synthetic Chimeric Antigen Receptor"
MALPVTALLLPLALLLHAARPEVQLVESGGGLVQPGGSLRLSCAVSGFALSNHGMSWVRRAPGKGLEWVSGIVYSGSTYYAASVKGRFTISRDNSRNTLYLQMNSLRPEDTAIYYCSAHGGESDVWGQGTTVTVSSASGGGGSGGRASGGGGSDIQLTQSPSSLSASVGDRVTITCRASQSISSYLNWYQQKPGKAPKLLIYAASSLQSGVPSRFSGSGSGTDFTLTISSLQPEDFATYYCQQSYSTPYTFGQGTKVEIKTTTPAPRPPTPAPTIASQPLSLRPEACRPAAGGAVHTRGLDFACDIYIWAPLAGTCGVLLLSLVITLYCKRGRKKLLYIFKQPFMRPVQTTQEEDGCSCRFPEEEEGGCELRVKFSRSADAPAYKQGQNQLYNELNLGRREEYDVLDKRRGRDPEMGGKPRRKNPQEGLYNELQKDKMAEAYSEIGMKGERRRGKGHDGLYQGLSTATKDTYDALHMQALPPR

SEQ ID NO: 6875 - protein, 490 aa, Artificial Sequence
  source: /note="Description of Artificial Sequence: Synthetic Chimeric Antigen Receptor"
MALPVTALLLPLALLLHAARPQVQLVQSGGGLVKPGGSLRLSCAASGFTFSDYYMSWIRQAPGKGLEWVSYISSSGNTIYYADSVKGRFTISRDNAKNSLYLQMNSLRAEDTAVYYCARSTMVREDYWGQGTLVTVSSASGGGGSGGRASGGGGSDIVLTQSPLSLPVTLGQPASISCKSSESLVHNSGKTYLNWFHQRPGQSPRRLIYEVSNRDSGVPDRFTGSGSGTDFTLKISRVEAEDVGVYYCMQGTHWPGIFGQGTKLEIKTTTPAPRPPTPAPTIASQPLSLRPEACRPAAGGAVHTRGLDFACDIYIWAPLAGTCGVLLLSLVITLYCKRGRKKLLYIFKQPFMRPVQTTQEEDGCSCRFPEEEEGGCELRVKFSRSADAPAYKQGQNQLYNELNLGRREEYDVLDKRRGRDPEMGGKPRRKNPQEGLYNELQKDKMAEAYSEIGMKGERRRGKGHDGLYQGLSTATKDTYDALHMQALPPR

SEQ ID NO: 6876 - protein, 487 aa, Artificial Sequence
  source: /note="Description of Artificial Sequence: Synthetic Chimeric Antigen Receptor"
MALPVTALLLPLALLLHAARPEVQLLESGGGLVQPGGSLRLSCAVSGFALSNHGMSWVRRAPGKGLEWVSGIVYSGSTYYAASVKGRFTISRDNSRNTLYLQMNSLRPEDTAIYYCSAHGGESDVWGQGTTVTVSSASGGGGSGGRASGGGGSDIVMTQTPLSLSVTPGQPASISCKSSQSLLRNDGKTPLYWYLQKAGQPPQLLIYEVSNRFSGVPDRFSGSGSGTDFTLKISRVEAEDVGAYYCMQNIQFPSFGGGTKLEIKTTTPAPRPPTPAPTIASQPLSLRPEACRPAAGGAVHTRGLDFACDIYIWAPLAGTCGVLLLSLVITLYCKRGRKKLLYIFKQPFMRPVQTTQEEDGCSCRFPEEEEGGCELRVKFSRSADAPAYKQGQNQLYNELNLGRREEYDVLDKRRGRDPEMGGKPRRKNPQEGLYNELQKDKMAEAYSEIGMKGERRRGKGHDGLYQGLSTATKDTYDALHMQALPPR

SEQ ID NO: 6877 - protein, 483 aa, Artificial Sequence
  source: /note="Description of Artificial Sequence: Synthetic Chimeric Antigen Receptor"
MALPVTALLLPLALLLHAARPQVQLVESGGGLVQPGGSLRLSCAVSGFALSNHGMSWVRRAPGKGLEWVSGIVYSGSTYYAASVKGRFTISRDNSRNTLYLQMNSLRPEDTAIYYCSAHGGESDVWGQGTTVTVSSASGGGGSGGRASGGGGSDIRLTQSPSPLSASVGDRVTITCQASEDINKFLNWYHQTPGKAPKLLIYDASTLQTGVPSRFSGSGSGTDFTLTINSLQPEDIGTYYCQQYESLPLTFGGGTKVEIKTTTPAPRPPTPAPTIASQPLSLRPEACRPAAGGAVHTRGLDFACDIYIWAPLAGTCGVLLLSLVITLYCKRGRKKLLYIFKQPFMRPVQTTQEEDGCSCRFPEEEEGGCELRVKFSRSADAPAYKQGQNQLYNELNLGRREEYDVLDKRRGRDPEMGGKPRRKNPQEGLYNELQKDKMAEAYSEIGMKGERRRGKGHDGLYQGLSTATKDTYDALHMQALPPR

SEQ ID NO: 6878 - protein, 484 aa, Artificial Sequence
  source: /note="Description of Artificial Sequence: Synthetic Chimeric Antigen Receptor"
MALPVTALLLPLALLLHAARPEVQLVETGGGLVQPGGSLRLSCAVSGFALSNHGMSWVRRAPGKGLEWVSGIVYSGSTYYAASVKGRFTISRDNSRNTLYLQMNSLRPEDTAIYYCSAHGGESDVWGQGTTVTVSSASGGGGSGGRASGGGGSETTLTQSPATLSVSPGERATLSCRASQSVGSNLAWYQQKPGQGPRLLIYGASTRATGIPARFSGSGSGTEFTLTISSLQPEDFAVYYCQQYNDWLPVTFGQGTKVEIKTTTPAPRPPTPAPTIASQPLSLRPEACRPAAGGAVHTRGLDFACDIYIWAPLAGTCGVLLLSLVITLYCKRGRKKLLYIFKQPFMRPVQTTQEEDGCSCRFPEEEEGGCELRVKFSRSADAPAYKQGQNQLYNELNLGRREEYDVLDKRRGRDPEMGGKPRRKNPQEGLYNELQKDKMAEAYSEIGMKGERRRGKGHDGLYQGLSTATKDTYDALHMQALPPR

SEQ ID NO: 6879 - protein, 485 aa, Artificial Sequence
  source: /note="Description of Artificial Sequence: Synthetic Chimeric Antigen Receptor"
MALPVTALLLPLALLLHAARPEVQLVESGGGLVQPGGSLRLSCAVSGFALSNHGMSWVRRAPGKGLEWVSGIVYSGSTYYAASVKGRFTISRDNSRNTLYLQMNSLRPEDTAIYYCSAHGGESDVWGQGTTVTVSSASGGGGSGGRASGGGGSEIVLTQSPGTLSLSPGERATLSCRASQSIGSSSLAWYQQKPGQAPRLLMYGASSRASGIPDRFSGSGSGTDFTLTISRLEPEDFAVYYCQQYAGSPPFTFGQGTKVEIKTTTPAPRPPTPAPTIASQPLSLRPEACRPAAGGAVHTRGLDFACDIYIWAPLAGTCGVLLLSLVITLYCKRGRKKLLYIFKQPFMRPVQTTQEEDGCSCRFPEEEEGGCELRVKFSRSADAPAYKQGQNQLYNELNLGRREEYDVLDKRRGRDPEMGGKPRRKNPQEGLYNELQKDKMAEAYSEIGMKGERRRGKGHDGLYQGLSTATKDTYDALHMQALPPR

SEQ ID NO: 6880 - protein, 487 aa, Artificial Sequence
  source: /note="Description of Artificial Sequence: Synthetic Chimeric Antigen Receptor"
MALPVTALLLPLALLLHAARPQVQLQESGPGLVKPSETLSLTCTVSGGSISSSYYYWGWIRQPPGKGLEWIGSIYYSGSAYYNPSLKSRVTISVDTSKNQFSLRLSSVTAADTAVYYCARHWQEWPDAFDIWGQGTMVTVSSGGGGSGGGGSGGGGSETTLTQSPAFMSATPGDKVIISCKASQDIDDAMNWYQQKPGEAPLFIIQSATSPVPGIPPRFSGSGFGTDFSLTINNIESEDAAYYFCLQHDNFPLTFGQGTKLEIKTTTPAPRPPTPAPTIASQPLSLRPEACRPAAGGAVHTRGLDFACDIYIWAPLAGTCGVLLLSLVITLYCKRGRKKLLYIFKQPFMRPVQTTQEEDGCSCRFPEEEEGGCELRVKFSRSADAPAYKQGQNQLYNELNLGRREEYDVLDKRRGRDPEMGGKPRRKNPQEGLYNELQKDKMAEAYSEIGMKGERRRGKGHDGLYQGLSTATKDTYDALHMQALPPR

SEQ ID NO: 6881 - protein, 488 aa, Artificial Sequence
  source: /note="Description of Artificial Sequence: Synthetic Chimeric Antigen Receptor"
MALPVTALLLPLALLLHAARPQVNLRESGPALVKPTQTLTLTCTFSGFSLRTSGMCVSWIRQPPGKALEWLARIDWDEDKFYSTSLKTRLTISKDTSDNQVVLRMTNMDPADTATYYCARSGAGGTSATAFDIWGPGTMVTVSSGGGGSGGGGSGGGGSDIQMTQSPSSLSASVGDRVTITCRASQDIYNNLWFQLKPGSAPRSLMYAANKSQSGVPSRFSGSASGTDFTLTISSLQPEDFATYYCQHYYRFPYSFGQGTKLEIKTTTPAPRPPTPAPTIASQPLSLRPEACRPAAGGAVHTRGLDFACDIYIWAPLAGTCGVLLLSLVITLYCKRGRKKLLYIFKQPFMRPVQTTQEEDGCSCRFPEEEEGGCELRVKFSRSADAPAYKQGQNQLYNELNLGRREEYDVLDKRRGRDPEMGGKPRRKNPQEGLYNELQKDKMAEAYSEIGMKGERRRGKGHDGLYQGLSTATKDTYDALHMQALPPR

SEQ ID NO: 6882 - protein, 490 aa, Artificial Sequence
  source: /note="Description of Artificial Sequence: Synthetic Chimeric Antigen Receptor"
MALPVTALLLPLALLLHAARPEVQLVESGGGLVKPGGSLRLSCAASGFTFSSYSMNWVRQAPGKGLEWVSSISSSSSYIYYADSVKGRFTISRDNAKNSLYLQMNSLRAEDTAVYYCAKTIAAVYAFDIWGQGTTVTVSSGGGGSGGGGSGGGGSEIVLTQSPLSLPVTPEEPASISCRSSQSLLHSNGYNYLDWYLQKPGQSPQLLIYLGSNRASGVPDRFSGSGSGTDFTLKISRVEAEDVGVYYCMQALQTPYIFGQGTKLEIKTTTPAPRPPTPAPTIASQPLSLRPEACRPAAGGAVHTRGLDFACDIYIWAPLAGTCGVLLLSLVITLYCKRGRKKLLYIFKQPFMRPVQTTQEEDGCSCRFPEEEEGGCELRVKFSRSADAPAYKQGQNQLYNELNLGRREEYDVLDKRRGRDPEMGGKPRRKNPQEGLYNELQKDKMAEAYSEIGMKGERRRGKGHDGLYQGLSTATKDTYDALHMQALPPR

SEQ ID NO: 6883 - protein, 484 aa, Artificial Sequence
  source: /note="Description of Artificial Sequence: Synthetic Chimeric Antigen Receptor"
MALPVTALLLPLALLLHAARPEVQLVESGGGLVKPGGSLRLSCAASGFTFSDYYMSWIRQAPGKGLEWVSYISSSGSTIYYADSVKGRFTISRDNAKNSLYLQMNSLRAEDTAVYYCARDLRGAFDIWGQGTMVTVSSGGGGSGGGGSGGGGSSYVLTQSPSVSAAPGYTATISCGGNNIGTKSVHWYQQKPGQAPLLVIRDDSVRPSKIPGRFSGSNSGNMATLTISGVQAGDEADFYCQVWDSDSEHVVFGGGTKLTVLTTTPAPRPPTPAPTIASQPLSLRPEACRPAAGGAVHTRGLDFACDIYIWAPLAGTCGVLLLSLVITLYCKRGRKKLLYIFKQPFMRPVQTTQEEDGCSCRFPEEEEGGCELRVKFSRSADAPAYKQGQNQLYNELNLGRREEYDVLDKRRGRDPEMGGKPRRKNPQEGLYNELQKDKMAEAYSEIGMKGERRRGKGHDGLYQGLSTATKDTYDALHMQALPPR

SEQ ID NO: 6884 - protein, 485 aa, Artificial Sequence
  source: /note="Description of Artificial Sequence: Synthetic Chimeric Antigen Receptor"
MALPVTALLLPLALLLHAARPQVQLVQSGAEVKKPGASVKVSCKPSGYTVTSHYIHWVRRAPGQGLEWMGMINPSGGVTAYSQTLQGRVTMTSDTSSSTVYMELSSLRSEDTAMYYCAREGSGSGWYFDFWGRGTLVTVSSGGGGSGGGGSGGGGSSYVLTQPPSVSVSPGQTASITCSGDGLSKKYVSWYQQKAGQSPVVLISRDKERPSGIPDRFSGSNSADTATLTISGTQAMDEADYYCQAWDDTTVVFGGGTKLTVLTTTPAPRPPTPAPTIASQPLSLRPEACRPAAGGAVHTRGLDFACDIYIWAPLAGTCGVLLLSLVITLYCKRGRKKLLYIFKQPFMRPVQTTQEEDGCSCRFPEEEEGGCELRVKFSRSADAPAYKQGQNQLYNELNLGRREEYDVLDKRRGRDPEMGGKPRRKNPQEGLYNELQKDKMAEAYSEIGMKGERRRGKGHDGLYQGLSTATKDTYDALHMQALPPR

SEQ ID NO: 6885 - protein, 488 aa, Artificial Sequence
  source: /note="Description of Artificial Sequence: Synthetic Chimeric Antigen Receptor"
MALPVTALLLPLALLLHAARPQVQLQESGPGLVKPSQTLSLTCTVSGGSISSGGYYWSWIRQHPGKGLEWIGYIYYSGSTYYNPSLKSRVTISVDTSKNQFSLKLSSVTAADTAVYYCARAGIAARLRGAFDIWGQGTMVTVSSGGGGSGGGGSGGGGSDIVMTQSPSSVSASVGDRVIITCRASQGIRNWLWYQQKPGKAPNLLIYAASNLQSGVPSRFSGSGSGADFTLTISSLQPEDVATYYCQKYNSAPFTFGPGTKVDIKTTTPAPRPPTPAPTIASQPLSLRPEACRPAAGGAVHTRGLDFACDIYIWAPLAGTCGVLLLSLVITLYCKRGRKKLLYIFKQPFMRPVQTTQEEDGCSCRFPEEEEGGCELRVKFSRSADAPAYKQGQNQLYNELNLGRREEYDVLDKRRGRDPEMGGKPRRKNPQEGLYNELQKDKMAEAYSEIGMKGERRRGKGHDGLYQGLSTATKDTYDALHMQALPPR

SEQ ID NO: 6886 - protein, 497 aa, Artificial Sequence
  source: /note="Description of Artificial Sequence: Synthetic Chimeric Antigen Receptor"
MALPVTALLLPLALLLHAARPQVQLVQSGAEVKKPGSSVKVSCKASGGTFSSYAISWVRQAPGQGLEWMGGIIPIFGTANYAQKFQGRVTITADESTSTAYMELSSLRSEDTAVYYCARRGGYQLLRWDVGLLRSAFDIWGQGTMVTVSSGGGGSGGGGSGGGGSSYVLTQPPSVSVAPGQTARITCGGNNIGSKSVHWYQQKPGQAPVLVLYGKNNRPSGVPDRFSGSRSGTTASLTITGAQAEDEADYYCSSRDSSGDHLRVFGTGTKVTVLTTTPAPRPPTPAPTIASQPLSLRPEACRPAAGGAVHTRGLDFACDIYIWAPLAGTCGVLLLSLVITLYCKRGRKKLLYIFKQPFMRPVQTTQEEDGCSCRFPEEEEGGCELRVKFSRSADAPAYKQGQNQLYNELNLGRREEYDVLDKRRGRDPEMGGKPRRKNPQEGLYNELQKDKMAEAYSEIGMKGERRRGKGHDGLYQGLSTATKDTYDALHMQALPPR

SEQ ID NO: 6887 - protein, 492 aa, Artificial Sequence
  source: /note="Description of Artificial Sequence: Synthetic Chimeric Antigen Receptor"
MALPVTALLLPLALLLHAARPEVQLQQSGPGLVKPSQTLSLTCAISGDSVSSNSAAWNWIRQSPSRGLEWLGRTYYRSKWYSFYAISLKSRIIINPDTSKNQFSLQLKSVTPEDTAVYYCARSSPEGLFLYWFDPWGQGTLVTVSSGGDGSGGGGSGGGGSSSELTQDPAVSVALGQTIRITCQGDSLGNYYATWYQQKPGQAPVLVIYGTNNRPSGIPDRFSASSSGNTASLTITGAQAEDEADYYCNSRDSSGHHLLFGTGTKVTVLTTTPAPRPPTPAPTIASQPLSLRPEACRPAAGGAVHTRGLDFACDIYIWAPLAGTCGVLLLSLVITLYCKRGRKKLLYIFKQPFMRPVQTTQEEDGCSCRFPEEEEGGCELRVKFSRSADAPAYKQGQNQLYNELNLGRREEYDVLDKRRGRDPEMGGKPRRKNPQEGLYNELQKDKMAEAYSEIGMKGERRRGKGHDGLYQGLSTATKDTYDALHMQALPPR

SEQ ID NO: 6888 - protein, 461 aa, Artificial Sequence
  source: /note="Description of Artificial Sequence: Synthetic Chimeric Antigen Receptor"
MALPVTALLLPLALLLHAARPQVQLVQSGAEVKKPGASVKVSCKASGYSFPDYYINWVRQAPGQGLEWMGWIYFASGNSEYNQKFTGRVTMTRDTSINTAYMELSSLTSEDTAVYFCASLYDYDWYFDVWGQGTMVTVSSGGGGSGGGGSGGGGSDIVMTQTPLSLSVTPGQPASISCKSSQSLVHSNGNTYLHWYLQKPGQSPQLLIYKVSNRFSGVPDRFSGSGSGTDFTLKISRVEAEDVGIYYCSQSSIYPWTFGQGTKLEIKGLAVSTISSFFPPGYQIYIWAPLAGTCGVLLLSLVITLYCKRGRKKLLYIFKQPFMRPVQTTQEEDGCSCRFPEEEEGGCELRVKFSRSADAPAYQQGQNQLYNELNLGRREEYDVLDKRRGRDPEMGGKPRRKNPQEGLYNELQKDKMAEAYSEIGMKGERRRGKGHDGLYQGLSTATKDTYDALHMQALPPR

SEQ ID NO: 6889 - protein, 464 aa, Artificial Sequence
  source: /note="Description of Artificial Sequence: Synthetic Chimeric Antigen Receptor"
MALPVTALLLPLALLLHAARPQVQLVQSGAEVKKPGASVKVSCKASGYSFPDYYINWVRQAPGQGLEWMGWIYFASGNSEYNQKFTGRVTMTRDTSINTAYMELSSLTSEDTAVYFCASLYDYDWYFDVWGQGTMVTVSSGGGGSGGGGSGGGGSDIVMTQTPLSLSVTPGQPASISCKSSQSLVHSNGNTYLHWYLQKPGQSPQLLIYKVSNRFSGVPDRFSGSGSGTDFTLKISRVEAEDVGIYYCSQSSIYPWTFGQGTKLEIKGLAVSTISSFFPPGYQIISFFLALTSTALLFLLFFLTLRFSVVKRGRKKLLYIFKQPFMRPVQTTQEEDGCSCRFPEEEEGGCELRVKFSRSADAPAYQQGQNQLYNELNLGRREEYDVLDKRRGRDPEMGGKPRRKNPQEGLYNELQKDKMAEAYSEIGMKGERRRGKGHDGLYQGLSTATKDTYDALHMQALPPR

SEQ ID NO: 6890 - protein, 490 aa, Artificial Sequence
  source: /note="Description of Artificial Sequence: Synthetic Chimeric Antigen Receptor"
MALPVTALLLPLALLLHAARPQVQLVQSGAEVKKPGASVKVSCKASGYSFPDYYINWVRQAPGQGLEWMGWIYFASGNSEYNQKFTGRVTMTRDTSINTAYMELSSLTSEDTAVYFCASLYDYDWYFDVWGQGTMVTVSSGGGGSGGGGSGGGGSDIVMTQTPLSLSVTPGQPASISCKSSQSLVHSNGNTYLHWYLQKPGQSPQLLIYKVSNRFSGVPDRFSGSGSGTDFTLKISRVEAEDVGIYYCSQSSIYPWTFGQGTKLEIKTTTPAPRPPTPAPTIASQPLSLRPEACRPAAGGAVHTRGLDFACDIYIWAPLAGTCGVLLLSLVITLYCKRGRKKLLYIFKQPFMRPVQTTQEEDGCSCRFPEEEEGGCELRVKFSRSADAPAYQQGQNQLYNELNLGRREEYDVLDKRRGRDPEMGGKPRRKNPQEGLYNELQKDKMAEAYSEIGMKGERRRGKGHDGLYQGLSTATKDTYDALHMQALPPR

SEQ ID NO: 6891 - protein, 493 aa, Artificial Sequence
  source: /note="Description of Artificial Sequence: Synthetic Chimeric Antigen Receptor"
MALPVTALLLPLALLLHAARPQVQLVQSGAEVKKPGASVKVSCKASGYSFPDYYINWVRQAPGQGLEWMGWIYFASGNSEYNQKFTGRVTMTRDTSINTAYMELSSLTSEDTAVYFCASLYDYDWYFDVWGQGTMVTVSSGGGGSGGGGSGGGGSDIVMTQTPLSLSVTPGQPASISCKSSQSLVHSNGNTYLHWYLQKPGQSPQLLIYKVSNRFSGVPDRFSGSGSGTDFTLKISRVEAEDVGIYYCSQSSIYPWTFGQGTKLEIKTTTPAPRPPTPAPTIASQPLSLRPEACRPAAGGAVHTRGLDFACDIISFFLALTSTALLFLLFFLTLRFSVVKRGRKKLLYIFKQPFMRPVQTTQEEDGCSCRFPEEEEGGCELRVKFSRSADAPAYQQGQNQLYNELNLGRREEYDVLDKRRGRDPEMGGKPRRKNPQEGLYNELQKDKMAEAYSEIGMKGERRRGKGHDGLYQGLSTATKDTYDALHMQALPPR

SEQ ID NO: 6892 - protein, 676 aa, Artificial Sequence
  source: /note="Description of Artificial Sequence: Synthetic Chimeric Antigen Receptor"
MALPVTALLLPLALLLHAARPQVQLVQSGAEVKKPGASVKVSCKASGYSFPDYYINWVRQAPGQGLEWMGWIYFASGNSEYNQKFTGRVTMTRDTSINTAYMELSSLTSEDTAVYFCASLYDYDWYFDVWGQGTMVTVSSGGGGSGGGGSGGGGSDIVMTQTPLSLSVTPGQPASISCKSSQSLVHSNGNTYLHWYLQKPGQSPQLLIYKVSNRFSGVPDRFSGSGSGTDFTLKISRVEAEDVGIYYCSQSSIYPWTFGQGTKLEIKEPKSPDKTHTCPPCPAPPVAGPSVFLFPPKPKDTLMIARTPEVTCVVVDVSHEDPEVKFNWYVDGVEVHNAKTKPREEQYNSTYRVVSVLTVLHQDWLNGKEYKCKVSNKALPAPIEKTISKAKGQPREPQVYTLPPSRDELTKNQVSLTCLVKGFYPSDIAVEWESNGQPENNYKTTPPVLDSDGSFFLYSKLTVDKSRWQQGNVFSCSVMHEALHNHYTQKSLSLSPGKIYIWAPLAGTCGVLLLSLVITLYCKRGRKKLLYIFKQPFMRPVQTTQEEDGCSCRFPEEEEGGCELRVKFSRSADAPAYQQGQNQLYNELNLGRREEYDVLDKRRGRDPEMGGKPRRKNPQEGLYNELQKDKMAEAYSEIGMKGERRRGKGHDGLYQGLSTATKDTYDALHMQALPPR

SEQ ID NO: 6893 - protein, 679 aa, Artificial Sequence
  source: /note="Description of Artificial Sequence: Synthetic Chimeric Antigen Receptor"
MALPVTALLLPLALLLHAARPQVQLVQSGAEVKKPGASVKVSCKASGYSFPDYYINWVRQAPGQGLEWMGWIYFASGNSEYNQKFTGRVTMTRDTSINTAYMELSSLTSEDTAVYFCASLYDYDWYFDVWGQGTMVTVSSGGGGSGGGGSGGGGSDIVMTQTPLSLSVTPGQPASISCKSSQSLVHSNGNTYLHWYLQKPGQSPQLLIYKVSNRFSGVPDRFSGSGSGTDFTLKISRVEAEDVGIYYCSQSSIYPWTFGQGTKLEIKEPKSPDKTHTCPPCPAPPVAGPSVFLFPPKPKDTLMIARTPEVTCVVVDVSHEDPEVKFNWYVDGVEVHNAKTKPREEQYNSTYRVVSVLTVLHQDWLNGKEYKCKVSNKALPAPIEKTISKAKGQPREPQVYTLPPSRDELTKNQVSLTCLVKGFYPSDIAVEWESNGQPENNYKTTPPVLDSDGSFFLYSKLTVDKSRWQQGNVFSCSVMHEALHNHYTQKSLSLSPGKIISFFLALTSTALLFLLFFLTLRFSVVKRGRKKLLYIFKQPFMRPVQTTQEEDGCSCRFPEEEEGGCELRVKFSRSADAPAYQQGQNQLYNELNLGRREEYDVLDKRRGRDPEMGGKPRRKNPQEGLYNELQKDKMAEAYSEIGMKGERRRGKGHDGLYQGLSTATKDTYDALHMQALPPR

SEQ ID NO: 6894 - protein, 461 aa, Artificial Sequence
  source: /note="Description of Artificial Sequence: Synthetic Chimeric Antigen Receptor"
MALPVTALLLPLALLLHAARPQVQLVQSGAEVKKPGASVKVSCKASGYSFPDYYINWVRQAPGQGLEWMGWIYFASGNSEYNQKFTGRVTMTRDTSSSTAYMELSSLRSEDTAVYFCASLYDYDWYFDVWGQGTMVTVSSGGGGSGGGGSGGGGSDIVMTQTPLSLSVTPGEPASISCKSSQSLVHSNGNTYLHWYLQKPGQSPQLLIYKVSNRFSGVPDRFSGSGSGADFTLKISRVEAEDVGVYYCAETSHVPWTFGQGTKLEIKGLAVSTISSFFPPGYQIYIWAPLAGTCGVLLLSLVITLYCKRGRKKLLYIFKQPFMRPVQTTQEEDGCSCRFPEEEEGGCELRVKFSRSADAPAYQQGQNQLYNELNLGRREEYDVLDKRRGRDPEMGGKPRRKNPQEGLYNELQKDKMAEAYSEIGMKGERRRGKGHDGLYQGLSTATKDTYDALHMQALPPR

SEQ ID NO: 6895 - protein, 464 aa, Artificial Sequence
  source: /note="Description of Artificial Sequence: Synthetic Chimeric Antigen Receptor"
MALPVTALLLPLALLLHAARPQVQLVQSGAEVKKPGASVKVSCKASGYSFPDYYINWVRQAPGQGLEWMGWIYFASGNSEYNQKFTGRVTMTRDTSSSTAYMELSSLRSEDTAVYFCASLYDYDWYFDVWGQGTMVTVSSGGGGSGGGGSGGGGSDIVMTQTPLSLSVTPGEPASISCKSSQSLVHSNGNTYLHWYLQKPGQSPQLLIYKVSNRFSGVPDRFSGSGSGADFTLKISRVEAEDVGVYYCAETSHVPWTFGQGTKLEIKGLAVSTISSFFPPGYQIISFFLALTSTALLFLLFFLTLRFSVVKRGRKKLLYIFKQPFMRPVQTTQEEDGCSCRFPEEEEGGCELRVKFSRSADAPAYQQGQNQLYNELNLGRREEYDVLDKRRGRDPEMGGKPRRKNPQEGLYNELQKDKMAEAYSEIGMKGERRRGKGHDGLYQGLSTATKDTYDALHMQALPPR

SEQ ID NO: 6896 - protein, 490 aa, Artificial Sequence
  source: /note="Description of Artificial Sequence: Synthetic Chimeric Antigen Receptor"
MALPVTALLLPLALLLHAARPQVQLVQSGAEVKKPGASVKVSCKASGYSFPDYYINWVRQAPGQGLEWMGWIYFASGNSEYNQKFTGRVTMTRDTSSSTAYMELSSLRSEDTAVYFCASLYDYDWYFDVWGQGTMVTVSSGGGGSGGGGSGGGGSDIVMTQTPLSLSVTPGEPASISCKSSQSLVHSNGNTYLHWYLQKPGQSPQLLIYKVSNRFSGVPDRFSGSGSGADFTLKISRVEAEDVGVYYCAETSHVPWTFGQGTKLEIKTTTPAPRPPTPAPTIASQPLSLRPEACRPAAGGAVHTRGLDFACDIYIWAPLAGTCGVLLLSLVITLYCKRGRKKLLYIFKQPFMRPVQTTQEEDGCSCRFPEEEEGGCELRVKFSRSADAPAYQQGQNQLYNELNLGRREEYDVLDKRRGRDPEMGGKPRRKNPQEGLYNELQKDKMAEAYSEIGMKGERRRGKGHDGLYQGLSTATKDTYDALHMQALPPR

SEQ ID NO: 6897 - protein, 493 aa, Artificial Sequence
  source: /note="Description of Artificial Sequence: Synthetic Chimeric Antigen Receptor"
MALPVTALLLPLALLLHAARPQVQLVQSGAEVKKPGASVKVSCKASGYSFPDYYINWVRQAPGQGLEWMGWIYFASGNSEYNQKFTGRVTMTRDTSSSTAYMELSSLRSEDTAVYFCASLYDYDWYFDVWGQGTMVTVSSGGGGSGGGGSGGGGSDIVMTQTPLSLSVTPGEPASISCKSSQSLVHSNGNTYLHWYLQKPGQSPQLLIYKVSNRFSGVPDRFSGSGSGADFTLKISRVEAEDVGVYYCAETSHVPWTFGQGTKLEIKTTTPAPRPPTPAPTIASQPLSLRPEACRPAAGGAVHTRGLDFACDIISFFLALTSTALLFLLFFLTLRFSVVKRGRKKLLYIFKQPFMRPVQTTQEEDGCSCRFPEEEEGGCELRVKFSRSADAPAYQQGQNQLYNELNLGRREEYDVLDKRRGRDPEMGGKPRRKNPQEGLYNELQKDKMAEAYSEIGMKGERRRGKGHDGLYQGLSTATKDTYDALHMQALPPR

SEQ ID NO: 6898 - protein, 676 aa, Artificial Sequence
  source: /note="Description of Artificial Sequence: Synthetic Chimeric Antigen Receptor"
MALPVTALLLPLALLLHAARPQVQLVQSGAEVKKPGASVKVSCKASGYSFPDYYINWVRQAPGQGLEWMGWIYFASGNSEYNQKFTGRVTMTRDTSSSTAYMELSSLRSEDTAVYFCASLYDYDWYFDVWGQGTMVTVSSGGGGSGGGGSGGGGSDIVMTQTPLSLSVTPGEPASISCKSSQSLVHSNGNTYLHWYLQKPGQSPQLLIYKVSNRFSGVPDRFSGSGSGADFTLKISRVEAEDVGVYYCAETSHVPWTFGQGTKLEIKEPKSPDKTHTCPPCPAPPVAGPSVFLFPPKPKDTLMIARTPEVTCVVVDVSHEDPEVKFNWYVDGVEVHNAKTKPREEQYNSTYRVVSVLTVLHQDWLNGKEYKCKVSNKALPAPIEKTISKAKGQPREPQVYTLPPSRDELTKNQVSLTCLVKGFYPSDIAVEWESNGQPENNYKTTPPVLDSDGSFFLYSKLTVDKSRWQQGNVFSCSVMHEALHNHYTQKSLSLSPGKIYIWAPLAGTCGVLLLSLVITLYCKRGRKKLLYIFKQPFMRPVQTTQEEDGCSCRFPEEEEGGCELRVKFSRSADAPAYQQGQNQLYNELNLGRREEYDVLDKRRGRDPEMGGKPRRKNPQEGLYNELQKDKMAEAYSEIGMKGERRRGKGHDGLYQGLSTATKDTYDALHMQALPPR

SEQ ID NO: 6899 - protein, 679 aa, Artificial Sequence
  source: /note="Description of Artificial Sequence: Synthetic Chimeric Antigen Receptor"
MALPVTALLLPLALLLHAARPQVQLVQSGAEVKKPGASVKVSCKASGYSFPDYYINWVRQAPGQGLEWMGWIYFASGNSEYNQKFTGRVTMTRDTSSSTAYMELSSLRSEDTAVYFCASLYDYDWYFDVWGQGTMVTVSSGGGGSGGGGSGGGGSDIVMTQTPLSLSVTPGEPASISCKSSQSLVHSNGNTYLHWYLQKPGQSPQLLIYKVSNRFSGVPDRFSGSGSGADFTLKISRVEAEDVGVYYCAETSHVPWTFGQGTKLEIKEPKSPDKTHTCPPCPAPPVAGPSVFLFPPKPKDTLMIARTPEVTCVVVDVSHEDPEVKFNWYVDGVEVHNAKTKPREEQYNSTYRVVSVLTVLHQDWLNGKEYKCKVSNKALPAPIEKTISKAKGQPREPQVYTLPPSRDELTKNQVSLTCLVKGFYPSDIAVEWESNGQPENNYKTTPPVLDSDGSFFLYSKLTVDKSRWQQGNVFSCSVMHEALHNHYTQKSLSLSPGKIISFFLALTSTALLFLLFFLTLRFSVVKRGRKKLLYIFKQPFMRPVQTTQEEDGCSCRFPEEEEGGCELRVKFSRSADAPAYQQGQNQLYNELNLGRREEYDVLDKRRGRDPEMGGKPRRKNPQEGLYNELQKDKMAEAYSEIGMKGERRRGKGHDGLYQGLSTATKDTYDALHMQALPPR

SEQ ID NO: 6900 - protein, 436 aa, Artificial Sequence
  source: /note="Description of Artificial Sequence: Synthetic Chimeric Antigen Receptor"
EVQLQQSGPELVKPGASVKISCKASGYTFTDYNMHWVKQSHGKSLEWIGYIYPYNGGTGYNQKFKSKATLTVDNSSSTAYMDVRSLTSEDSAVYYCARGRPAMDYWGQGTSVTVSSGGGGSGGGGSGGGGSDIVLTQSPASLAVSLGQRATISCRASESVDNYGISFMNWFQQKPGQPPKLLIYAASNQGSGVPARFSGSGSGTDFSLNIHPMEEDDTAMYFCQQSKEVPWTFGGGTKLEIKGLAVSTISSFFPPGYQIYIWAPLAGTCGVLLLSLVITLYCKRGRKKLLYIFKQPFMRPVQTTQEEDGCSCRFPEEEEGGCELRVKFSRSADAPAYQQGQNQLYNELNLGRREEYDVLDKRRGRDPEMGGKPRRKNPQEGLYNELQKDKMAEAYSEIGMKGERRRGKGHDGLYQGLSTATKDTYDALHMQALPPR

SEQ ID NO: 6901 - protein, 439 aa, Artificial Sequence
  source: /note="Description of Artificial Sequence: Synthetic Chimeric Antigen Receptor"
EVQLQQSGPELVKPGASVKISCKASGYTFTDYNMHWVKQSHGKSLEWIGYIYPYNGGTGYNQKFKSKATLTVDNSSSTAYMDVRSLTSEDSAVYYCARGRPAMDYWGQGTSVTVSSGGGGSGGGGSGGGGSDIVLTQSPASLAVSLGQRATISCRASESVDNYGISFMNWFQQKPGQPPKLLIYAASNQGSGVPARFSGSGSGTDFSLNIHPMEEDDTAMYFCQQSKEVPWTFGGGTKLEIKGLAVSTISSFFPPGYQIISFFLALTSTALLFLLFFLTLRFSVVKRGRKKLLYIFKQPFMRPVQTTQEEDGCSCRFPEEEEGGCELRVKFSRSADAPAYQQGQNQLYNELNLGRREEYDVLDKRRGRDPEMGGKPRRKNPQEGLYNELQKDKMAEAYSEIGMKGERRRGKGHDGLYQGLSTATKDTYDALHMQALPPR

SEQ ID NO: 6902 - protein, 465 aa, Artificial Sequence
  source: /note="Description of Artificial Sequence: Synthetic Chimeric Antigen Receptor"
EVQLQQSGPELVKPGASVKISCKASGYTFTDYNMHWVKQSHGKSLEWIGYIYPYNGGTGYNQKFKSKATLTVDNSSSTAYMDVRSLTSEDSAVYYCARGRPAMDYWGQGTSVTVSSGGGGSGGGGSGGGGSDIVLTQSPASLAVSLGQRATISCRASESVDNYGISFMNWFQQKPGQPPKLLIYAASNQGSGVPARFSGSGSGTDFSLNIHPMEEDDTAMYFCQQSKEVPWTFGGGTKLEIKTTTPAPRPPTPAPTIASQPLSLRPEACRPAAGGAVHTRGLDFACDIYIWAPLAGTCGVLLLSLVITLYCKRGRKKLLYIFKQPFMRPVQTTQEEDGCSCRFPEEEEGGCELRVKFSRSADAPAYQQGQNQLYNELNLGRREEYDVLDKRRGRDPEMGGKPRRKNPQEGLYNELQKDKMAEAYSEIGMKGERRRGKGHDGLYQGLSTATKDTYDALHMQALPPR

SEQ ID NO: 6903 - protein, 468 aa, Artificial Sequence
  source: /note="Description of Artificial Sequence: Synthetic Chimeric Antigen Receptor"
EVQLQQSGPELVKPGASVKISCKASGYTFTDYNMHWVKQSHGKSLEWIGYIYPYNGGTGYNQKFKSKATLTVDNSSSTAYMDVRSLTSEDSAVYYCARGRPAMDYWGQGTSVTVSSGGGGSGGGGSGGGGSDIVLTQSPASLAVSLGQRATISCRASESVDNYGISFMNWFQQKPGQPPKLLIYAASNQGSGVPARFSGSGSGTDFSLNIHPMEEDDTAMYFCQQSKEVPWTFGGGTKLEIKTTTPAPRPPTPAPTIASQPLSLRPEACRPAAGGAVHTRGLDFACDIISFFLALTSTALLFLLFFLTLRFSVVKRGRKKLLYIFKQPFMRPVQTTQEEDGCSCRFPEEEEGGCELRVKFSRSADAPAYQQGQNQLYNELNLGRREEYDVLDKRRGRDPEMGGKPRRKNPQEGLYNELQKDKMAEAYSEIGMKGERRRGKGHDGLYQGLSTATKDTYDALHMQALPPR

SEQ ID NO: 6904 - protein, 651 aa, Artificial Sequence
  source: /note="Description of Artificial Sequence: Synthetic Chimeric Antigen Receptor"
EVQLQQSGPELVKPGASVKISCKASGYTFTDYNMHWVKQSHGKSLEWIGYIYPYNGGTGYNQKFKSKATLTVDNSSSTAYMDVRSLTSEDSAVYYCARGRPAMDYWGQGTSVTVSSGGGGSGGGGSGGGGSDIVLTQSPASLAVSLGQRATISCRASESVDNYGISFMNWFQQKPGQPPKLLIYAASNQGSGVPARFSGSGSGTDFSLNIHPMEEDDTAMYFCQQSKEVPWTFGGGTKLEIKEPKSPDKTHTCPPCPAPPVAGPSVFLFPPKPKDTLMIARTPEVTCVVVDVSHEDPEVKFNWYVDGVEVHNAKTKPREEQYNSTYRVVSVLTVLHQDWLNGKEYKCKVSNKALPAPIEKTISKAKGQPREPQVYTLPPSRDELTKNQVSLTCLVKGFYPSDIAVEWESNGQPENNYKTTPPVLDSDGSFFLYSKLTVDKSRWQQGNVFSCSVMHEALHNHYTQKSLSLSPGKIYIWAPLAGTCGVLLLSLVITLYCKRGRKKLLYIFKQPFMRPVQTTQEEDGCSCRFPEEEEGGCELRVKFSRSADAPAYQQGQNQLYNELNLGRREEYDVLDKRRGRDPEMGGKPRRKNPQEGLYNELQKDKMAEAYSEIGMKGERRRGKGHDGLYQGLSTATKDTYDALHMQALPPR

SEQ ID NO: 6905 - protein, 654 aa, Artificial Sequence
  source: /note="Description of Artificial Sequence: Synthetic Chimeric Antigen Receptor"
EVQLQQSGPELVKPGASVKISCKASGYTFTDYNMHWVKQSHGKSLEWIGYIYPYNGGTGYNQKFKSKATLTVDNSSSTAYMDVRSLTSEDSAVYYCARGRPAMDYWGQGTSVTVSSGGGGSGGGGSGGGGSDIVLTQSPASLAVSLGQRATISCRASESVDNYGISFMNWFQQKPGQPPKLLIYAASNQGSGVPARFSGSGSGTDFSLNIHPMEEDDTAMYFCQQSKEVPWTFGGGTKLEIKEPKSPDKTHTCPPCPAPPVAGPSVFLFPPKPKDTLMIARTPEVTCVVVDVSHEDPEVKFNWYVDGVEVHNAKTKPREEQYNSTYRVVSVLTVLHQDWLNGKEYKCKVSNKALPAPIEKTISKAKGQPREPQVYTLPPSRDELTKNQVSLTCLVKGFYPSDIAVEWESNGQPENNYKTTPPVLDSDGSFFLYSKLTVDKSRWQQGNVFSCSVMHEALHNHYTQKSLSLSPGKIISFFLALTSTALLFLLFFLTLRFSVVKRGRKKLLYIFKQPFMRPVQTTQEEDGCSCRFPEEEEGGCELRVKFSRSADAPAYQQGQNQLYNELNLGRREEYDVLDKRRGRDPEMGGKPRRKNPQEGLYNELQKDKMAEAYSEIGMKGERRRGKGHDGLYQGLSTATKDTYDALHMQALPPR

SEQ ID NO: 6906 - protein, 434 aa, Artificial Sequence
  source: /note="Description of Artificial Sequence: Synthetic Chimeric Antigen Receptor"
QVQLQQSGPELVRPGTFVKISCKASGYTFTNYDINWVNQRPGQGLEWIGWIYPGDGSTKYNEKFKAKATLTADKSSSTAYLQLNNLTSENSAVYFCASGYEDAMDYWGQGTSVTVSSGGGGSGGGGSGGGGSDIKMTQSPSSMYASLGERVIINCKASQDINSYLSWFQQKPGKSPKTLIYRANRLVDGVPSRFSGSGSGQDYSLTISSLEYEDMGIYYCLQYDEFPLTFGAGTKLELKRGLAVSTISSFFPPGYQIYIWAPLAGTCGVLLLSLVITLYCKRGRKKLLYIFKQPFMRPVQTTQEEDGCSCRFPEEEEGGCELRVKFSRSADAPAYQQGQNQLYNELNLGRREEYDVLDKRRGRDPEMGGKPRRKNPQEGLYNELQKDKMAEAYSEIGMKGERRRGKGHDGLYQGLSTATKDTYDALHMQALPPR

SEQ ID NO: 6907 - protein, 437 aa, Artificial Sequence
  source: /note="Description of Artificial Sequence: Synthetic Chimeric Antigen Receptor"
QVQLQQSGPELVRPGTFVKISCKASGYTFTNYDINWVNQRPGQGLEWIGWIYPGDGSTKYNEKFKAKATLTADKSSSTAYLQLNNLTSENSAVYFCASGYEDAMDYWGQGTSVTVSSGGGGSGGGGSGGGGSDIKMTQSPSSMYASLGERVIINCKASQDINSYLSWFQQKPGKSPKTLIYRANRLVDGVPSRFSGSGSGQDYSLTISSLEYEDMGIYYCLQYDEFPLTFGAGTKLELKRGLAVSTISSFFPPGYQIISFFLALTSTALLFLLFFLTLRFSVVKRGRKKLLYIFKQPFMRPVQTTQEEDGCSCRFPEEEEGGCELRVKFSRSADAPAYQQGQNQLYNELNLGRREEYDVLDKRRGRDPEMGGKPRRKNPQEGLYNELQKDKMAEAYSEIGMKGERRRGKGHDGLYQGLSTATKDTYDALHMQALPPR

SEQ ID NO: 6908 - protein, 463 aa, Artificial Sequence
  source: /note="Description of Artificial Sequence: Synthetic Chimeric Antigen Receptor"
QVQLQQSGPELVRPGTFVKISCKASGYTFTNYDINWVNQRPGQGLEWIGWIYPGDGSTKYNEKFKAKATLTADKSSSTAYLQLNNLTSENSAVYFCASGYEDAMDYWGQGTSVTVSSGGGGSGGGGSGGGGSDIKMTQSPSSMYASLGERVIINCKASQDINSYLSWFQQKPGKSPKTLIYRANRLVDGVPSRFSGSGSGQDYSLTISSLEYEDMGIYYCLQYDEFPLTFGAGTKLELKRTTTPAPRPPTPAPTIASQPLSLRPEACRPAAGGAVHTRGLDFACDIYIWAPLAGTCGVLLLSLVITLYCKRGRKKLLYIFKQPFMRPVQTTQEEDGCSCRFPEEEEGGCELRVKFSRSADAPAYQQGQNQLYNELNLGRREEYDVLDKRRGRDPEMGGKPRRKNPQEGLYNELQKDKMAEAYSEIGMKGERRRGKGHDGLYQGLSTATKDTYDALHMQALPPR

SEQ ID NO: 6909 - protein, 466 aa, Artificial Sequence
  source: /note="Description of Artificial Sequence: Synthetic Chimeric Antigen Receptor"
QVQLQQSGPELVRPGTFVKISCKASGYTFTNYDINWVNQRPGQGLEWIGWIYPGDGSTKYNEKFKAKATLTADKSSSTAYLQLNNLTSENSAVYFCASGYEDAMDYWGQGTSVTVSSGGGGSGGGGSGGGGSDIKMTQSPSSMYASLGERVIINCKASQDINSYLSWFQQKPGKSPKTLIYRANRLVDGVPSRFSGSGSGQDYSLTISSLEYEDMGIYYCLQYDEFPLTFGAGTKLELKRTTTPAPRPPTPAPTIASQPLSLRPEACRPAAGGAVHTRGLDFACDIISFFLALTSTALLFLLFFLTLRFSVVKRGRKKLLYIFKQPFMRPVQTTQEEDGCSCRFPEEEEGGCELRVKFSRSADAPAYQQGQNQLYNELNLGRREEYDVLDKRRGRDPEMGGKPRRKNPQEGLYNELQKDKMAEAYSEIGMKGERRRGKGHDGLYQGLSTATKDTYDALHMQALPPR

SEQ ID NO: 6910 - protein, 649 aa, Artificial Sequence
  source: /note="Description of Artificial Sequence: Synthetic Chimeric Antigen Receptor"
QVQLQQSGPELVRPGTFVKISCKASGYTFTNYDINWVNQRPGQGLEWIGWIYPGDGSTKYNEKFKAKATLTADKSSSTAYLQLNNLTSENSAVYFCASGYEDAMDYWGQGTSVTVSSGGGGSGGGGSGGGGSDIKMTQSPSSMYASLGERVIINCKASQDINSYLSWFQQKPGKSPKTLIYRANRLVDGVPSRFSGSGSGQDYSLTISSLEYEDMGIYYCLQYDEFPLTFGAGTKLELKREPKSPDKTHTCPPCPAPPVAGPSVFLFPPKPKDTLMIARTPEVTCVVVDVSHEDPEVKFNWYVDGVEVHNAKTKPREEQYNSTYRVVSVLTVLHQDWLNGKEYKCKVSNKALPAPIEKTISKAKGQPREPQVYTLPPSRDELTKNQVSLTCLVKGFYPSDIAVEWESNGQPENNYKTTPPVLDSDGSFFLYSKLTVDKSRWQQGNVFSCSVMHEALHNHYTQKSLSLSPGKIYIWAPLAGTCGVLLLSLVITLYCKRGRKKLLYIFKQPFMRPVQTTQEEDGCSCRFPEEEEGGCELRVKFSRSADAPAYQQGQNQLYNELNLGRREEYDVLDKRRGRDPEMGGKPRRKNPQEGLYNELQKDKMAEAYSEIGMKGERRRGKGHDGLYQGLSTATKDTYDALHMQALPPR

SEQ ID NO: 6911 - protein, 650 aa, Artificial Sequence
  source: /note="Description of Artificial Sequence: Synthetic Chimeric Antigen Receptor"
QVQLQQSGPELVRPGTFVKISCKASGYTFTNYDINWVNQRPGQGLEWIGWIYPGDGSTKYNEKFKAKATLTADKSSSTAYLQLNNLTSENSAVYFCASGYEDAMDYWGQGTSVTVSSGGGGSGGGGSGGGGSDIKMTQSPSSMYASLGERVIINCKASQDINSYLSWFQQKPGKSPKTLIYRANRLVDGVPSRFSGSGSGQDYSLTISSLEYEDMGIYYCLQYDEFPLTFGAGTKLELKREPKSPDKTHTCPPCPAPPVAGPSVFLFPPKPKDTLMIARTPEVTCVVVDVSHEDPEVKFNWYVDGVEVHNAKTKPREEQYNSTYRVVSVLTVLHQDWLNGKEYKCKVSNKALPAPIEKTISKAKGQPREPQVYTLPPSRDELTKNQVSLTCLVKGFYPSDIAVEWESNGQPENNYKTTPPVLDSDGSFFLYSKLTVDKSRWQQGNVFSCSVMHEALHNHYTQKSLSLSPGKIISFFLALTSTALLFLLFFLTLRFSVVKRGRKKLLYIFKQPFMRPVQTTQEEDGCSCRFPEEEEGGCELRVKFSRSADAPAYQQGQNQLYNELNLGRREEYDVLDKRRGRDPEMGGKPRRKNPQEGLYNELQKDKMAEAYSEIGMKGERRRGKGHDGLYQGLSTATKDTYDALHMQALP

SEQ ID NO: 6912 - protein, 444 aa, Artificial Sequence
  source: /note="Description of Artificial Sequence: Synthetic Chimeric Antigen Receptor"
EVKLQESGPELVKPGASVKMSCKASGYKFTDYVVHWLKQKPGQGLEWIGYINPYNDGTKYNEKFKGKATLTSDKSSSTAYMEVSSLTSEDSAVYYCARDYRYEVYGMDYWGQGTSVTVSSGGGGSGGGGSGGGGSDIVLTQSPTIMSASPGERVTMTCTASSSVNYIHWYQQKSGDSPLRWIFDTSKVASGVPARFSGSGSGTSYSLTISTMEAEDAATYYCQQWRSYPLTFGDGTRLELKRADAAPTVSGLAVSTISSFFPPGYQIYIWAPLAGTCGVLLLSLVITLYCKRGRKKLLYIFKQPFMRPVQTTQEEDGCSCRFPEEEEGGCELRVKFSRSADAPAYQQGQNQLYNELNLGRREEYDVLDKRRGRDPEMGGKPRRKNPQEGLYNELQKDKMAEAYSEIGMKGERRRGKGHDGLYQGLSTATKDTYDALHMQALPPR

SEQ ID NO: 6913 - protein, 447 aa, Artificial Sequence
  source: /note="Description of Artificial Sequence: Synthetic Chimeric Antigen Receptor"
EVKLQESGPELVKPGASVKMSCKASGYKFTDYVVHWLKQKPGQGLEWIGYINPYNDGTKYNEKFKGKATLTSDKSSSTAYMEVSSLTSEDSAVYYCARDYRYEVYGMDYWGQGTSVTVSSGGGGSGGGGSGGGGSDIVLTQSPTIMSASPGERVTMTCTASSSVNYIHWYQQKSGDSPLRWIFDTSKVASGVPARFSGSGSGTSYSLTISTMEAEDAATYYCQQWRSYPLTFGDGTRLELKRADAAPTVSGLAVSTISSFFPPGYQIISFFLALTSTALLFLLFFLTLRFSVVKRGRKKLLYIFKQPFMRPVQTTQEEDGCSCRFPEEEEGGCELRVKFSRSADAPAYQQGQNQLYNELNLGRREEYDVLDKRRGRDPEMGGKPRRKNPQEGLYNELQKDKMAEAYSEIGMKGERRRGKGHDGLYQGLSTATKDTYDALHMQALPPR

SEQ ID NO: 6914 - protein, 473 aa, Artificial Sequence
  source: /note="Description of Artificial Sequence: Synthetic Chimeric Antigen Receptor"
EVKLQESGPELVKPGASVKMSCKASGYKFTDYVVHWLKQKPGQGLEWIGYINPYNDGTKYNEKFKGKATLTSDKSSSTAYMEVSSLTSEDSAVYYCARDYRYEVYGMDYWGQGTSVTVSSGGGGSGGGGSGGGGSDIVLTQSPTIMSASPGERVTMTCTASSSVNYIHWYQQKSGDSPLRWIFDTSKVASGVPARFSGSGSGTSYSLTISTMEAEDAATYYCQQWRSYPLTFGDGTRLELKRADAAPTVSTTTPAPRPPTPAPTIASQPLSLRPEACRPAAGGAVHTRGLDFACDIYIWAPLAGTCGVLLLSLVITLYCKRGRKKLLYIFKQPFMRPVQTTQEEDGCSCRFPEEEEGGCELRVKFSRSADAPAYQQGQNQLYNELNLGRREEYDVLDKRRGRDPEMGGKPRRKNPQEGLYNELQKDKMAEAYSEIGMKGERRRGKGHDGLYQGLSTATKDTYDALHMQALPPR

SEQ ID NO: 6915 - protein, 476 aa, Artificial Sequence
  source: /note="Description of Artificial Sequence: Synthetic Chimeric Antigen Receptor"
EVKLQESGPELVKPGASVKMSCKASGYKFTDYVVHWLKQKPGQGLEWIGYINPYNDGTKYNEKFKGKATLTSDKSSSTAYMEVSSLTSEDSAVYYCARDYRYEVYGMDYWGQGTSVTVSSGGGGSGGGGSGGGGSDIVLTQSPTIMSASPGERVTMTCTASSSVNYIHWYQQKSGDSPLRWIFDTSKVASGVPARFSGSGSGTSYSLTISTMEAEDAATYYCQQWRSYPLTFGDGTRLELKRADAAPTVSTTTPAPRPPTPAPTIASQPLSLRPEACRPAAGGAVHTRGLDFACDIISFFLALTSTALLFLLFFLTLRFSVVKRGRKKLLYIFKQPFMRPVQTTQEEDGCSCRFPEEEEGGCELRVKFSRSADAPAYQQGQNQLYNELNLGRREEYDVLDKRRGRDPEMGGKPRRKNPQEGLYNELQKDKMAEAYSEIGMKGERRRGKGHDGLYQGLSTATKDTYDALHMQALPPR

SEQ ID NO: 6916 - protein, 659 aa, Artificial Sequence
  source: /note="Description of Artificial Sequence: Synthetic Chimeric Antigen Receptor"
EVKLQESGPELVKPGASVKMSCKASGYKFTDYVVHWLKQKPGQGLEWIGYINPYNDGTKYNEKFKGKATLTSDKSSSTAYMEVSSLTSEDSAVYYCARDYRYEVYGMDYWGQGTSVTVSSGGGGSGGGGSGGGGSDIVLTQSPTIMSASPGERVTMTCTASSSVNYIHWYQQKSGDSPLRWIFDTSKVASGVPARFSGSGSGTSYSLTISTMEAEDAATYYCQQWRSYPLTFGDGTRLELKRADAAPTVSEPKSPDKTHTCPPCPAPPVAGPSVFLFPPKPKDTLMIARTPEVTCVVVDVSHEDPEVKFNWYVDGVEVHNAKTKPREEQYNSTYRVVSVLTVLHQDWLNGKEYKCKVSNKALPAPIEKTISKAKGQPREPQVYTLPPSRDELTKNQVSLTCLVKGFYPSDIAVEWESNGQPENNYKTTPPVLDSDGSFFLYSKLTVDKSRWQQGNVFSCSVMHEALHNHYTQKSLSLSPGKIYIWAPLAGTCGVLLLSLVITLYCKRGRKKLLYIFKQPFMRPVQTTQEEDGCSCRFPEEEEGGCELRVKFSRSADAPAYQQGQNQLYNELNLGRREEYDVLDKRRGRDPEMGGKPRRKNPQEGLYNELQKDKMAEAYSEIGMKGERRRGKGHDGLYQGLSTATKDTYDALHMQALPPR

SEQ ID NO: 6917 - protein, 662 aa, Artificial Sequence
  source: /note="Description of Artificial Sequence: Synthetic Chimeric Antigen Receptor"
EVKLQESGPELVKPGASVKMSCKASGYKFTDYVVHWLKQKPGQGLEWIGYINPYNDGTKYNEKFKGKATLTSDKSSSTAYMEVSSLTSEDSAVYYCARDYRYEVYGMDYWGQGTSVTVSSGGGGSGGGGSGGGGSDIVLTQSPTIMSASPGERVTMTCTASSSVNYIHWYQQKSGDSPLRWIFDTSKVASGVPARFSGSGSGTSYSLTISTMEAEDAATYYCQQWRSYPLTFGDGTRLELKRADAAPTVSEPKSPDKTHTCPPCPAPPVAGPSVFLFPPKPKDTLMIARTPEVTCVVVDVSHEDPEVKFNWYVDGVEVHNAKTKPREEQYNSTYRVVSVLTVLHQDWLNGKEYKCKVSNKALPAPIEKTISKAKGQPREPQVYTLPPSRDELTKNQVSLTCLVKGFYPSDIAVEWESNGQPENNYKTTPPVLDSDGSFFLYSKLTVDKSRWQQGNVFSCSVMHEALHNHYTQKSLSLSPGKIISFFLALTSTALLFLLFFLTLRFSVVKRGRKKLLYIFKQPFMRPVQTTQEEDGCSCRFPEEEEGGCELRVKFSRSADAPAYQQGQNQLYNELNLGRREEYDVLDKRRGRDPEMGGKPRRKNPQEGLYNELQKDKMAEAYSEIGMKGERRRGKGHDGLYQGLSTATKDTYDALHMQALPPR

SEQ ID NO: 6918 - protein, 440 aa, Artificial Sequence
  source: /note="Description of Artificial Sequence: Synthetic Chimeric Antigen Receptor"
QVQLQQPGAEVVKPGASVKMSCKASGYTFTSYYIHWIKQTPGQGLEWVGVIYPGNDDISYNQKFKGKATLTADKSSTTAYMQLSSLTSEDSAVYYCAREVRLRYFDVWGAGTTVTVSSGGGGSGGGGSGGGGSNIMLTQSPSSLAVSAGEKVTMSCKSSQSVFFSSSQKNYLAWYQQIPGQSPKLLIYWASTRESGVPDRFTGSGSGTDFTLTISSVQSEDLAIYYCHQYLSSRTFGGGTKLEIKRGLAVSTISSFFPPGYQIYIWAPLAGTCGVLLLSLVITLYCKRGRKKLLYIFKQPFMRPVQTTQEEDGCSCRFPEEEEGGCELRVKFSRSADAPAYQQGQNQLYNELNLGRREEYDVLDKRRGRDPEMGGKPRRKNPQEGLYNELQKDKMAEAYSEIGMKGERRRGKGHDGLYQGLSTATKDTYDALHMQALPPR

SEQ ID NO: 6919 - protein, 443 aa, Artificial Sequence
  source: /note="Description of Artificial Sequence: Synthetic Chimeric Antigen Receptor"
QVQLQQPGAEVVKPGASVKMSCKASGYTFTSYYIHWIKQTPGQGLEWVGVIYPGNDDISYNQKFKGKATLTADKSSTTAYMQLSSLTSEDSAVYYCAREVRLRYFDVWGAGTTVTVSSGGGGSGGGGSGGGGSNIMLTQSPSSLAVSAGEKVTMSCKSSQSVFFSSSQKNYLAWYQQIPGQSPKLLIYWASTRESGVPDRFTGSGSGTDFTLTISSVQSEDLAIYYCHQYLSSRTFGGGTKLEIKRGLAVSTISSFFPPGYQIISFFLALTSTALLFLLFFLTLRFSVVKRGRKKLLYIFKQPFMRPVQTTQEEDGCSCRFPEEEEGGCELRVKFSRSADAPAYQQGQNQLYNELNLGRREEYDVLDKRRGRDPEMGGKPRRKNPQEGLYNELQKDKMAEAYSEIGMKGERRRGKGHDGLYQGLSTATKDTYDALHMQALPPR

SEQ ID NO: 6920 - protein, 469 aa, Artificial Sequence
  source: /note="Description of Artificial Sequence: Synthetic Chimeric Antigen Receptor"
QVQLQQPGAEVVKPGASVKMSCKASGYTFTSYYIHWIKQTPGQGLEWVGVIYPGNDDISYNQKFKGKATLTADKSSTTAYMQLSSLTSEDSAVYYCAREVRLRYFDVWGAGTTVTVSSGGGGSGGGGSGGGGSNIMLTQSPSSLAVSAGEKVTMSCKSSQSVFFSSSQKNYLAWYQQIPGQSPKLLIYWASTRESGVPDRFTGSGSGTDFTLTISSVQSEDLAIYYCHQYLSSRTFGGGTKLEIKRTTTPAPRPPTPAPTIASQPLSLRPEACRPAAGGAVHTRGLDFACDIYIWAPLAGTCGVLLLSLVITLYCKRGRKKLLYIFKQPFMRPVQTTQEEDGCSCRFPEEEEGGCELRVKFSRSADAPAYQQGQNQLYNELNLGRREEYDVLDKRRGRDPEMGGKPRRKNPQEGLYNELQKDKMAEAYSEIGMKGERRRGKGHDGLYQGLSTATKDTYDALHMQALPPR

SEQ ID NO: 6921 - protein, 472 aa, Artificial Sequence
  source: /note="Description of Artificial Sequence: Synthetic Chimeric Antigen Receptor"
QVQLQQPGAEVVKPGASVKMSCKASGYTFTSYYIHWIKQTPGQGLEWVGVIYPGNDDISYNQKFKGKATLTADKSSTTAYMQLSSLTSEDSAVYYCAREVRLRYFDVWGAGTTVTVSSGGGGSGGGGSGGGGSNIMLTQSPSSLAVSAGEKVTMSCKSSQSVFFSSSQKNYLAWYQQIPGQSPKLLIYWASTRESGVPDRFTGSGSGTDFTLTISSVQSEDLAIYYCHQYLSSRTFGGGTKLEIKRTTTPAPRPPTPAPTIASQPLSLRPEACRPAAGGAVHTRGLDFACDIISFFLALTSTALLFLLFFLTLRFSVVKRGRKKLLYIFKQPFMRPVQTTQEEDGCSCRFPEEEEGGCELRVKFSRSADAPAYQQGQNQLYNELNLGRREEYDVLDKRRGRDPEMGGKPRRKNPQEGLYNELQKDKMAEAYSEIGMKGERRRGKGHDGLYQGLSTATKDTYDALHMQALPPR

SEQ ID NO: 6922 - protein, 655 aa, Artificial Sequence
  source: /note="Description of Artificial Sequence: Synthetic Chimeric Antigen Receptor"
QVQLQQPGAEVVKPGASVKMSCKASGYTFTSYYIHWIKQTPGQGLEWVGVIYPGNDDISYNQKFKGKATLTADKSSTTAYMQLSSLTSEDSAVYYCAREVRLRYFDVWGAGTTVTVSSGGGGSGGGGSGGGGSNIMLTQSPSSLAVSAGEKVTMSCKSSQSVFFSSSQKNYLAWYQQIPGQSPKLLIYWASTRESGVPDRFTGSGSGTDFTLTISSVQSEDLAIYYCHQYLSSRTFGGGTKLEIKREPKSPDKTHTCPPCPAPPVAGPSVFLFPPKPKDTLMIARTPEVTCVVVDVSHEDPEVKFNWYVDGVEVHNAKTKPREEQYNSTYRVVSVLTVLHQDWLNGKEYKCKVSNKALPAPIEKTISKAKGQPREPQVYTLPPSRDELTKNQVSLTCLVKGFYPSDIAVEWESNGQPENNYKTTPPVLDSDGSFFLYSKLTVDKSRWQQGNVFSCSVMHEALHNHYTQKSLSLSPGKIYIWAPLAGTCGVLLLSLVITLYCKRGRKKLLYIFKQPFMRPVQTTQEEDGCSCRFPEEEEGGCELRVKFSRSADAPAYQQGQNQLYNELNLGRREEYDVLDKRRGRDPEMGGKPRRKNPQEGLYNELQKDKMAEAYSEIGMKGERRRGKGHDGLYQGLSTATKDTYDALHMQALPPR

SEQ ID NO: 6923 - protein, 658 aa, Artificial Sequence
  source: /note="Description of Artificial Sequence: Synthetic Chimeric Antigen Receptor"
QVQLQQPGAEVVKPGASVKMSCKASGYTFTSYYIHWIKQTPGQGLEWVGVIYPGNDDISYNQKFKGKATLTADKSSTTAYMQLSSLTSEDSAVYYCAREVRLRYFDVWGAGTTVTVSSGGGGSGGGGSGGGGSNIMLTQSPSSLAVSAGEKVTMSCKSSQSVFFSSSQKNYLAWYQQIPGQSPKLLIYWASTRESGVPDRFTGSGSGTDFTLTISSVQSEDLAIYYCHQYLSSRTFGGGTKLEIKREPKSPDKTHTCPPCPAPPVAGPSVFLFPPKPKDTLMIARTPEVTCVVVDVSHEDPEVKFNWYVDGVEVHNAKTKPREEQYNSTYRVVSVLTVLHQDWLNGKEYKCKVSNKALPAPIEKTISKAKGQPREPQVYTLPPSRDELTKNQVSLTCLVKGFYPSDIAVEWESNGQPENNYKTTPPVLDSDGSFFLYSKLTVDKSRWQQGNVFSCSVMHEALHNHYTQKSLSLSPGKIISFFLALTSTALLFLLFFLTLRFSVVKRGRKKLLYIFKQPFMRPVQTTQEEDGCSCRFPEEEEGGCELRVKFSRSADAPAYQQGQNQLYNELNLGRREEYDVLDKRRGRDPEMGGKPRRKNPQEGLYNELQKDKMAEAYSEIGMKGERRRGKGHDGLYQGLSTATKDTYDALHMQALPPR

SEQ ID NO: 6924 - protein, 657 aa, Artificial Sequence
  source: /note="Description of Artificial Sequence: Synthetic Chimeric Antigen Receptor"
QVQLQQPGAEVVKPGASVKMSCKASGYTFTSYYIHWIKQTPGQGLEWVGVIYPGNDDISYNQKFKGKATLTADKSSTTAYMQLSSLTSEDSAVYYCAREVRLRYFDVWGAGTTVTVSSGGGGSGGGGSGGGGSNIMLTQSPSSLAVSAGEKVTMSCKSSQSVFFSSSQKNYLAWYQQIPGQSPKLLIYWASTRESGVPDRFTGSGSGTDFTLTISSVQSEDLAIYYCHQYLSSRTFGGGTKLEIKREPKSPDKTHTCPPCPAPPVAGPSVFLFPPKPKDTLMIARTPEVTCVVVDVSHEDPEVKFNWYVDGVEVHNAKTKPREEQYNSTYRVVSVLTVLHQDWLNGKEYKCKVSNKALPAPIEKTISKAKGQPREPQVYTLPPSRDELTKNQVSLTCLVKGFYPSDIAVEWESNGQPENNYKTTPPVLDSDGSFFLYSKLTVDKSRWQQGNVFSCSVMHEALHNHYTQKSLSLSPGKIISFFLALTSTALLFLLFFLTLRFSVVKRGRKKLLYIFKQPFMRPVQTTQEEDGCSCRFPEEEEGGCELRVKFSRSADAPAYQQGQNQLYNELNLGRREEYDVLDKRRGRDPEMGGKPRRKNPQEGLYNELQKDKMAEAYSEIGMKGERRRGKGHDGLYQGLSTATKDTYDALHMQALPP

SEQ ID NO: 6925 - protein, 490 aa, Artificial Sequence
  source: /note="Description of Artificial Sequence: Synthetic Chimeric Antigen Receptor"
MALPVTALLLPLALLLHAARPEVQLVESGGGLVQPGGSLRLSCAASGFTFSSYAMSWVRQAPGKGLEWVSAISGSGGSTYYADSVKGRFTISRDNSKNTLYLQMNSLRAEDTAVYYCAKVEGSGSLDYWGQGTLVTVSSGGGGSGGGGSGGGGSEIVMTQSPGTLSLSPGERATLSCRASQSVSSAYLAWYQQKPGQPPRLLISGASTRATGIPDRFGGSGSGTDFTLTISRLEPEDFAVYYCQHYGSSFNGSSLFIFGQGTRLEIKTTTPAPRPPTPAPTIASQPLSLRPEACRPAAGGAVHTRGLDFACDIYIWAPLAGTCGVLLLSLVITLYCKRGRKKLLYIFKQPFMRPVQTTQEEDGCSCRFPEEEEGGCELRVKFSRSADAPAYKQGQNQLYNELNLGRREEYDVLDKRRGRDPEMGGKPRRKNPQEGLYNELQKDKMAEAYSEIGMKGERRRGKGHDGLYQGLSTATKDTYDALHMQALPPR

SEQ ID NO: 6926 - protein, 492 aa, Artificial Sequence
  source: /note="Description of Artificial Sequence: Synthetic Chimeric Antigen Receptor"
MALPVTALLLPLALLLHAARPEVQLVETGGGLVQPGGSLRLSCAASGFTFSSYAMSWVRQAPGKGLEWVSAISGSGGSTYYADSVKGRFTISRDNSKNTLYLQMNTLKAEDTAVYYCARATYKRELRYYYGMDVWGQGTTVTVSSGGGGSGGGGSGGGGSEIVLTQSPSTLSLSPGESATLSCRASQSVSTTFLAWYQQKPGQAPRLLIYGSSNRATGIPDRFSGSGSGTDFTLTIRRLEPEDFAVYYCQQYHSSPSWTFGQGTKVEIKTTTPAPRPPTPAPTIASQPLSLRPEACRPAAGGAVHTRGLDFACDIYIWAPLAGTCGVLLLSLVITLYCKRGRKKLLYIFKQPFMRPVQTTQEEDGCSCRFPEEEEGGCELRVKFSRSADAPAYKQGQNQLYNELNLGRREEYDVLDKRRGRDPEMGGKPRRKNPQEGLYNELQKDKMAEAYSEIGMKGERRRGKGHDGLYQGLSTATKDTYDALHMQALPPR

SEQ ID NO: 6927 - protein, 483 aa, Artificial Sequence
  source: /note="Description of Artificial Sequence: Synthetic Chimeric Antigen Receptor"
MALPVTALLLPLALLLHAARPEVQLVETGGGLVQPGRSLRLSCAASGFTFDDYAMHWVRQAPGKGLEWVSGISWNSGSIGYADSVKGRFTISRDNAKNSLYLQMNSLRDEDTAVYYCARVGKAVPDVWGQGTTVTVSSGGGGSGGGGSGGGGSDIVMTQTPSSLSASVGDRVTITCRASQSISSYLNWYQQKPGKAPKLLIYAASSLQSGVPSRFSGSGSGTDFTLTISSLQPEDFATYYCQQSYSTPYSFGQGTRLEIKTTTPAPRPPTPAPTIASQPLSLRPEACRPAAGGAVHTRGLDFACDIYIWAPLAGTCGVLLLSLVITLYCKRGRKKLLYIFKQPFMRPVQTTQEEDGCSCRFPEEEEGGCELRVKFSRSADAPAYKQGQNQLYNELNLGRREEYDVLDKRRGRDPEMGGKPRRKNPQEGLYNELQKDKMAEAYSEIGMKGERRRGKGHDGLYQGLSTATKDTYDALHMQALPPR

SEQ ID NO: 6928 - protein, 488 aa, Artificial Sequence
  source: /note="Description of Artificial Sequence: Synthetic Chimeric Antigen Receptor"
MALPVTALLLPLALLLHAARPEVQLLETGGGLVQPGGSLRLSCAASGFSFSSYAMSWVRQAPGKGLEWVSAISGSGGSTYYADSVKGRFTISRDNSKNTLYLQMNSLRAEDTAVYYCAKALVGATGAFDIWGQGTLVTVSSGGGGSGGGGSGGGGSEIVLTQSPGTLSLSPGERATLSCRASQSLSSNFLAWYQQKPGQAPGLLIYGASNWATGTPDRFSGSGSGTDFTLTITRLEPEDFAVYYCQYYGTSPMYTFGQGTKVEIKTTTPAPRPPTPAPTIASQPLSLRPEACRPAAGGAVHTRGLDFACDIYIWAPLAGTCGVLLLSLVITLYCKRGRKKLLYIFKQPFMRPVQTTQEEDGCSCRFPEEEEGGCELRVKFSRSADAPAYKQGQNQLYNELNLGRREEYDVLDKRRGRDPEMGGKPRRKNPQEGLYNELQKDKMAEAYSEIGMKGERRRGKGHDGLYQGLSTATKDTYDALHMQALPPR

SEQ ID NO: 6929 - protein, 489 aa, Artificial Sequence
  source: /note="Description of Artificial Sequence: Synthetic Chimeric Antigen Receptor"
MALPVTALLLPLALLLHAARPEVQLVESGGGLVQPGGSLRLSCAASGFTFSSYAMSWVRQAPGKGLEWVSAISGSGGSTYYADSVKGRFTISRDNSKNTLYLQMNSLRAEDTAVYYCAKMGWSSGYLGAFDIWGQGTTVTVSSGGGGSGGGGSGGGGSEIVLTQSPGTLSLSPGERATLSCRASQSVASSFLWYQQKPGQAPRLLIYGASGRATGIPDRFSGSGSGTDFTLTISRLEPEDFAVYYCQHYGGSPRLIFGGGTKVDIKTTTPAPRPPTPAPTIASQPLSLRPEACRPAAGGAVHTRGLDFACDIYIWAPLAGTCGVLLLSLVITLYCKRGRKKLLYIFKQPFMRPVQTTQEEDGCSCRFPEEEEGGCELRVKFSRSADAPAYKQGQNQLYNELNLGRREEYDVLDKRRGRDPEMGGKPRRKNPQEGLYNELQKDKMAEAYSEIGMKGERRRGKGHDGLYQGLSTATKDTYDALHMQALPPR

SEQ ID NO: 6930 - protein, 490 aa, Artificial Sequence
  source: /note="Description of Artificial Sequence: Synthetic Chimeric Antigen Receptor"
MALPVTALLLPLALLLHAARPEVQLVESGGGLVQPGGSLRLSCAASGFTFSSYAMSWVRQAPGKGLEWVSAISGSGGSTYYADSVKGRFTISRDNSKNTLYLQMNSLRAEDTAVYYCAKMGWSSGYLGAFDIWGQGTTVTVSSGGGGSGGGGSGGGGSEIVLTQSPGTLSLSPGERATLSCRASQSVASSFLAWYQQKPGQAPRLLIYGASGRATGIPDRFSGSGSGTDFTLTISRLEPEDFAVYYCQHYGGSPRLTFGGGTKVDIKTTTPAPRPPTPAPTIASQPLSLRPEACRPAAGGAVHTRGLDFACDIYIWAPLAGTCGVLLLSLVITLYCKRGRKKLLYIFKQPFMRPVQTTQEEDGCSCRFPEEEEGGCELRVKFSRSADAPAYKQGQNQLYNELNLGRREEYDVLDKRRGRDPEMGGKPRRKNPQEGLYNELQKDKMAEAYSEIGMKGERRRGKGHDGLYQGLSTATKDTYDALHMQALPPR

SEQ ID NO: 6931 - protein, 489 aa, Artificial Sequence
  source: /note="Description of Artificial Sequence: Synthetic Chimeric Antigen Receptor"
MALPVTALLLPLALLLHAARPEVQLVESGGGLVQPGRSLRLSCTASGFTFDDYAMHWVRQRPGKGLEWVASINWKGNSLAYGDSVKGRFAISRDNAKNTVFLQMNSLRTEDTAVYYCASHQGVAYYNYAMDVWGRGTLVTVSSGGGGSGGGGSGGGGSEIVLTQSPGTLSLSPGERATLSCRATQSIGSSFLWYQQRPGQAPRLLIYGASQRATGIPDRFSGRGSGTDFTLTISRVEPEDSAVYYCQHYESSPSWIFGQGTKVEIKTTTPAPRPPTPAPTIASQPLSLRPEACRPAAGGAVHTRGLDFACDIYIWAPLAGTCGVLLLSLVITLYCKRGRKKLLYIFKQPFMRPVQTTQEEDGCSCRFPEEEEGGCELRVKFSRSADAPAYKQGQNQLYNELNLGRREEYDVLDKRRGRDPEMGGKPRRKNPQEGLYNELQKDKMAEAYSEIGMKGERRRGKGHDGLYQGLSTATKDTYDALHMQALPPR

SEQ ID NO: 6932 - protein, 492 aa, Artificial Sequence
  source: /note="Description of Artificial Sequence: Synthetic Chimeric Antigen Receptor"
MALPVTALLLPLALLLHAARPQVQLVESGGGLVQPGGSLRLSCAASGFTFSSYAMSWVRQAPGKGLEWVSAISGSGGSTYYADSVKGRFTISRDNAKNSLYLQMNSLRAEDTAIYYCARATYKRELRYYYGMDVWGQGTMVTVSSGGGGSGGGGSGGGGSEIVMTQSPGTVSLSPGERATLSCRASQSVSSSFLAWYQQKPGQAPRLLIYGASSRATGIPDRFSGSGSGTDFTLTISRLEPEDSAVYYCQQYHSSPSWTFGQGTRLEIKTTTPAPRPPTPAPTIASQPLSLRPEACRPAAGGAVHTRGLDFACDIYIWAPLAGTCGVLLLSLVITLYCKRGRKKLLYIFKQPFMRPVQTTQEEDGCSCRFPEEEEGGCELRVKFSRSADAPAYKQGQNQLYNELNLGRREEYDVLDKRRGRDPEMGGKPRRKNPQEGLYNELQKDKMAEAYSEIGMKGERRRGKGHDGLYQGLSTATKDTYDALHMQALPPR

SEQ ID NO: 6933 - protein, 488 aa, Artificial Sequence
  source: /note="Description of Artificial Sequence: Synthetic Chimeric Antigen Receptor"
MALPVTALLLPLALLLHAARPEVQLLESGGGLVQPGGSLRLSCAASGFTFSSYAMSWVRQAPGKGLEWVSAISGSGGSTYYADSVKGRFTISRDNSKNTLYLQMNSLRAEDTAVYYCVLWFGEGFDPWGQGTLVTVSSGGGGSGGGGSGGGGSDIVLTQSPLSLPVTPGEPASISCRSSQSLLHSNGYNYLDWYLQKPGQSPQLLIYLGSNRASGVPDRFSGSGSGTDFTLKISRVEAEDVGVYYCMQALQTPLTFGGGTKVDIKTTTPAPRPPTPAPTIASQPLSLRPEACRPAAGGAVHTRGLDFACDIYIWAPLAGTCGVLLLSLVITLYCKRGRKKLLYIFKQPFMRPVQTTQEEDGCSCRFPEEEEGGCELRVKFSRSADAPAYKQGQNQLYNELNLGRREEYDVLDKRRGRDPEMGGKPRRKNPQEGLYNELQKDKMAEAYSEIGMKGERRRGKGHDGLYQGLSTATKDTYDALHMQALPPR

SEQ ID NO: 6934 - protein, 486 aa, Artificial Sequence
  source: /note="Description of Artificial Sequence: Synthetic Chimeric Antigen Receptor"
MALPVTALLLPLALLLHAARPEVQLLESGGGLVQPGGSLRLSCAASGFTFSSYAMSWVRQAPGKGLEWVSAISGSGGSTYYADSVKGRFTISRDNSKNTLYLQMNSLRAEDTAVYYCAKIPQTGTFDYWGQGTLVTVSSGGGGSGGGGSGGGGSEIVLTQSPGTLSLSPGERATLSCRASQSVSSSYLAWYQQRPGQAPRLLIYGASSRATGIPDRFSGSGSGTDFTLTISRLEPEDFAVYYCQHYGSSPSWTFGQGTRLEIKTTTPAPRPPTPAPTIASQPLSLRPEACRPAAGGAVHTRGLDFACDIYIWAPLAGTCGVLLLSLVITLYCKRGRKKLLYIFKQPFMRPVQTTQEEDGCSCRFPEEEEGGCELRVKFSRSADAPAYKQGQNQLYNELNLGRREEYDVLDKRRGRDPEMGGKPRRKNPQEGLYNELQKDKMAEAYSEIGMKGERRRGKGHDGLYQGLSTATKDTYDALHMQALPPR

SEQ ID NO: 6935 - protein, 486 aa, Artificial Sequence; identical to SEQ ID NO: 6934
  source: /note="Description of Artificial Sequence: Synthetic Chimeric Antigen Receptor"

SEQ ID NO: 6936 - protein, 495 aa, Artificial Sequence
  source: /note="Description of Artificial Sequence: Synthetic Chimeric Antigen Receptor"
MALPVTALLLPLALLLHAARPQVQLVESGGGLVQPGGSLRLSCAASGFTFSSYAMSWVRQAPGKGLEWVSAISGSGGSTYYADSVKGRFTISRDNSKNTLYLQMNSLRAEDTAVYYCAKVGYDSSGYYRDYYGMDVWGQGTTVTVSSGGGGSGGGGSGGGGSEIVLTQSPGTLSLSPGERATLSCRASQSVSSSYLAWYQQKPGQAPRLLIYGTSSRATGISDRFSGSGSGTDFTLTISRLEPEDFAVYYCQHYGNSPPKFTFGPGTKLEIKTTTPAPRPPTPAPTIASQPLSLRPEACRPAAGGAVHTRGLDFACDIYIWAPLAGTCGVLLLSLVITLYCKRGRKKLLYIFKQPFMRPVQTTQEEDGCSCRFPEEEEGGCELRVKFSRSADAPAYKQGQNQLYNELNLGRREEYDVLDKRRGRDPEMGGKPRRKNPQEGLYNELQKDKMAEAYSEIGMKGERRRGKGHDGLYQGLSTATKDTYDALHMQALPPR

SEQ ID NO: 6937 - protein, 483 aa, Artificial Sequence; identical to SEQ ID NO: 6874
  source: /note="Description of Artificial Sequence: Synthetic Chimeric Antigen Receptor"

SEQ ID NO: 6938 - protein, 490 aa, Artificial Sequence
  source: /note="Description of Artificial Sequence: Synthetic Chimeric Antigen Receptor"
MALPVTALLLPLALLLHAARPQVQLVESGGGLVQPGRSLRLSCAASGFTFSNYAMSWVRQAPGKGLGWVSGISRSGENTYYADSVKGRFTISRDNSKNTLYLQMNSLRDEDTAVYYCARSPAHYYGGMDVWGQGTTVTVSSASGGGGSGGRASGGGGSDIVLTQSPGTLSLSPGERATLSCRASQSISSSFLAWYQQKPGQAPRLLIYGASRRATGIPDRFSGSGSGTDFTLTISRLEPEDSAVYYCQQYHSSPSWTFGQGTKLEIKTTTPAPRPPTPAPTIASQPLSLRPEACRPAAGGAVHTRGLDFACDIYIWAPLAGTCGVLLLSLVITLYCKRGRKKLLYIFKQPFMRPVQTTQEEDGCSCRFPEEEEGGCELRVKFSRSADAPAYKQGQNQLYNELNLGRREEYDVLDKRRGRDPEMGGKPRRKNPQEGLYNELQKDKMAEAYSEIGMKGERRRGKGHDGLYQGLSTATKDTYDALHMQALPPR

SEQ ID NO: 6939 - protein, 488 aa, Artificial Sequence; identical to SEQ ID NO: 6870
  source: /note="Description of Artificial Sequence: Synthetic Chimeric Antigen Receptor"

SEQ ID NO: 6940 - protein, 487 aa, Artificial Sequence; identical to SEQ ID NO: 6876
  source: /note="Description of Artificial Sequence: Synthetic Chimeric Antigen Receptor"

SEQ ID NO: 6941 - protein, 493 aa, Artificial Sequence; identical to SEQ ID NO: 6866
  source: /note="Description of Artificial Sequence: Synthetic Chimeric Antigen Receptor"

SEQ ID NO: 6942 - protein, 490 aa, Artificial Sequence
  source: /note="Description of Artificial Sequence: Synthetic Chimeric Antigen Receptor"
MALPVTALLLPLALLLHAARPQVQLQESGGGLVQPGGSLRLSCAASGFTFSSDAMTWVRQAPGKGLEWVSVISGSGGTTYYADSVKGRFTISRDNSKNTLYLQMNSLRAEDTAVYYCAKLDSSGYYYARGPRYWGQGTLVTVSSASGGGGSGGRASGGGGSDIQLTQSPSSLSASVGDRVTITCRASQSISSYLNWYQQKPGKAPKLLIYGASTLASGVPARFSGSGSGTHFTLTINSLQSEDSATYYCQQSYKRASFGQGTKVEIKTTTPAPRPPTPAPTIASQPLSLRPEACRPAAGGAVHTRGLDFACDIYIWAPLAGTCGVLLLSLVITLYCKRGRKKLLYIFKQPFMRPVQTTQEEDGCSCRFPEEEEGGCELRVKFSRSADAPAYKQGQNQLYNELNLGRREEYDVLDKRRGRDPEMGGKPRRKNPQEGLYNELQKDKMAEAYSEIGMKGERRRGKGHDGLYQGLSTATKDTYDALHMQALPPR

SEQ ID NO: 6943 - protein, 491 aa, Artificial Sequence; identical to SEQ ID NO: 6868
  source: /note="Description of Artificial Sequence: Synthetic Chimeric Antigen Receptor"

SEQ ID NO: 6944 - protein, 482 aa, Artificial Sequence; identical to SEQ ID NO: 6814
  source: /note="Description of Artificial Sequence: Synthetic Chimeric Antigen Receptor"

SEQ ID NO: 6945 - protein, 483 aa, Artificial Sequence; identical to SEQ ID NO: 6871
  source: /note="Description of Artificial Sequence: Synthetic Chimeric Antigen Receptor"

SEQ ID NO: 6946 - protein, 485 aa, Artificial Sequence; identical to SEQ ID NO: 6872
  source: /note="Description of Artificial Sequence: Synthetic Chimeric Antigen Receptor"

SEQ ID NO: 6947 - protein, 483 aa, Artificial Sequence; identical to SEQ ID NO: 6873
  source: /note="Description of Artificial Sequence: Synthetic Chimeric Antigen Receptor"

SEQ ID NO: 6948 - protein, 490 aa, Artificial Sequence
  source: /note="Description of Artificial Sequence: Synthetic Chimeric Antigen Receptor"
MALPVTALLLPLALLLHAARPQVQLVQSGGGLVKPGGSLRLSCAASGFTFSDYYMSWIRQAPGKGLEWVSYISSSGNTIYYADSVKGRFTISRDNAKNSLYLQMNSLRAEDTAVYYCARSTMVREDYWGQGTLVTVSSASGGGGSGGRASGGGGSDIVLTQSPLSLPVTLGQPASISCKSSESLVHNSGKTYLNWFHQRPGQSPRRLIYEVSNRDSGVPDRFTGSGSGTDFTLKISRVEAEDVGVYYCMQGTHWPGTFGQGTKLEIKTTTPAPRPPTPAPTIASQPLSLRPEACRPAAGGAVHTRGLDFACDIYIWAPLAGTCGVLLLSLVITLYCKRGRKKLLYIFKQPFMRPVQTTQEEDGCSCRFPEEEEGGCELRVKFSRSADAPAYKQGQNQLYNELNLGRREEYDVLDKRRGRDPEMGGKPRRKNPQEGLYNELQKDKMAEAYSEIGMKGERRRGKGHDGLYQGLSTATKDTYDALHMQALPPR

SEQ ID NO: 6949 - protein, 483 aa, Artificial Sequence; identical to SEQ ID NO: 6877
  source: /note="Description of Artificial Sequence: Synthetic Chimeric Antigen Receptor"

SEQ ID NO: 6950 - protein, 484 aa, Artificial Sequence; identical to SEQ ID NO: 6878
  source: /note="Description of Artificial Sequence: Synthetic Chimeric Antigen Receptor"

SEQ ID NO: 6951 - protein, 485 aa, Artificial Sequence; identical to SEQ ID NO: 6879
  source: /note="Description of Artificial Sequence: Synthetic Chimeric Antigen Receptor"

SEQ ID NO: 6952 - protein, 487 aa, Artificial Sequence; identical to SEQ ID NO: 6880
  source: /note="Description of Artificial Sequence: Synthetic Chimeric Antigen Receptor"

SEQ ID NO: 6953 - protein, 489 aa, Artificial Sequence
  source: /note="Description of Artificial Sequence: Synthetic Chimeric Antigen Receptor"
MALPVTALLLPLALLLHAARPQVNLRESGPALVKPTQTLTLTCTFSGFSLRTSGMCVSWIRQPPGKALEWLARIDWDEDKFYSTSLKTRLTISKDTSDNQVVLRMTNMDPADTATYYCARSGAGGTSATAFDIWGPGTMVTVSSGGGGSGGGGSGGGGSDIQMTQSPSSLSASVGDRVTITCRASQDIYNNLAWFQLKPGSAPRSLMYAANKSQSGVPSRFSGSASGTDFTLTISSLQPEDFATYYCQHYYRFPYSFGQGTKLEIKTTTPAPRPPTPAPTIASQPLSLRPEACRPAAGGAVHTRGLDFACDIYIWAPLAGTCGVLLLSLVITLYCKRGRKKLLYIFKQPFMRPVQTTQEEDGCSCRFPEEEEGGCELRVKFSRSADAPAYKQGQNQLYNELNLGRREEYDVLDKRRGRDPEMGGKPRRKNPQEGLYNELQKDKMAEAYSEIGMKGERRRGKGHDGLYQGLSTATKDTYDALHMQALPPR

SEQ ID NO: 6954 - protein, 490 aa, Artificial Sequence
  source: /note="Description of Artificial Sequence: Synthetic Chimeric Antigen Receptor"
MALPVTALLLPLALLLHAARPEVQLVESGGGLVKPGGSLRLSCAASGFTFSSYSMNWVRQAPGKGLEWVSSISSSSSYIYYADSVKGRFTISRDNAKNSLYLQMNSLRAEDTAVYYCAKTIAAVYAFDIWGQGTTVTVSSGGGGSGGGGSGGGGSEIVLTQSPLSLPVTPEEPASISCRSSQSLLHSNGYNYLDWYLQKPGQSPQLLIYLGSNRASGVPDRFSGSGSGTDFTLKISRVEAEDVGVYYCMQALQTPYTFGQGTKLEIKTTTPAPRPPTPAPTIASQPLSLRPEACRPAAGGAVHTRGLDFACDIYIWAPLAGTCGVLLLSLVITLYCKRGRKKLLYIFKQPFMRPVQTTQEEDGCSCRFPEEEEGGCELRVKFSRSADAPAYKQGQNQLYNELNLGRREEYDVLDKRRGRDPEMGGKPRRKNPQEGLYNELQKDKMAEAYSEIGMKGERRRGKGHDGLYQGLSTATKDTYDALHMQALPPR

SEQ ID NO: 6955 - protein, 484 aa, Artificial Sequence; identical to SEQ ID NO: 6883
  source: /note="Description of Artificial Sequence: Synthetic Chimeric Antigen Receptor"

SEQ ID NO: 6956 - protein, 485 aa, Artificial Sequence; identical to SEQ ID NO: 6884
  source: /note="Description of Artificial Sequence: Synthetic Chimeric Antigen Receptor"

SEQ ID NO: 6957 - protein, 489 aa, Artificial Sequence
  source: /note="Description of Artificial Sequence: Synthetic Chimeric Antigen Receptor"
MALPVTALLLPLALLLHAARPQVQLQESGPGLVKPSQTLSLTCTVSGGSISSGGYYWSWIRQHPGKGLEWIGYIYYSGSTYYNPSLKSRVTISVDTSKNQFSLKLSSVTAADTAVYYCARAGIAARLRGAFDIWGQGTMVTVSSGGGGSGGGGSGGGGSDIVMTQSPSSVSASVGDRVIITCRASQGIRNWLAWYQQKPGKAPNLLIYAASNLQSGVPSRFSGSGSGADFTLTISSLQPEDVATYYCQKYNSAPFTFGPGTKVDIKTTTPAPRPPTPAPTIASQPLSLRPEACRPAAGGAVHTRGLDFACDIYIWAPLAGTCGVLLLSLVITLYCKRGRKKLLYIFKQPFMRPVQTTQEEDGCSCRFPEEEEGGCELRVKFSRSADAPAYKQGQNQLYNELNLGRREEYDVLDKRRGRDPEMGGKPRRKNPQEGLYNELQKDKMAEAYSEIGMKGERRRGKGHDGLYQGLSTATKDTYDALHMQALPPR

SEQ ID NO: 6958 - protein, 497 aa, Artificial Sequence; identical to SEQ ID NO: 6886
  source: /note="Description of Artificial Sequence: Synthetic Chimeric Antigen Receptor"

SEQ ID NO: 6959 - protein, 492 aa, Artificial Sequence; identical to SEQ ID NO: 6887
  source: /note="Description of Artificial Sequence: Synthetic Chimeric Antigen Receptor"

SEQ ID NO: 6960 - protein, 490 aa, Artificial Sequence
  source: /note="Description of Artificial Sequence: Synthetic Chimeric Antigen Receptor"
MALPVTALLLPLALLLHAARPEVQLVESGGGLVQPGGSLRLSCAASGFTFSSYAMSWVRQAPGKGLEWVSAISGSGGSTYYADSVKGRFTISRDNSKNTLYLQMNSLRAEDTAVYYCAKVEGSGSLDYWGQGTLVTVSSGGGGSGGGGSGGGGSEIVMTQSPGTLSLSPGERATLSCRASQSVSSAYLAWYQQKPGQPPRLLISGASTRATGIPDRFGGSGSGTDFTLTISRLEPEDFAVYYCQHYGSSFNGSSLFTFGQGTRLEIKTTTPAPRPPTPAPTIASQPLSLRPEACRPAAGGAVHTRGLDFACDIYIWAPLAGTCGVLLLSLVITLYCKRGRKKLLYIFKQPFMRPVQTTQEEDGCSCRFPEEEEGGCELRVKFSRSADAPAYKQGQNQLYNELNLGRREEYDVLDKRRGRDPEMGGKPRRKNPQEGLYNELQKDKMAEAYSEIGMKGERRRGKGHDGLYQGLSTATKDTYDALHMQALPPR

SEQ ID NO: 6961 - protein, 485 aa, Artificial Sequence
  source: /note="Description of Artificial Sequence: Synthetic Chimeric Antigen Receptor"
MALPVTALLLPLALLLHAARPEVQLVETGGGLVQPGGSLRLSCAASGITFSRYPMSWVRQAPGKGLEWVSGISDSGVSTYYADSAKGRFTISRDNSKNTLFLQMSSLRDEDTAVYYCVTRAGSEASDIWGQGTMVTVSSGGGGSGGGGSGGGGSEIVLTQSPATLSLSPGERATLSCRASQSVSNSLAWYQQKPGQAPRLLIYDASSRATGIPDRFSGSGSGTDFTLTISRLEPEDFAIYYCQQFGTSSGLTFGGGTKLEIKTTTPAPRPPTPAPTIASQPLSLRPEACRPAAGGAVHTRGLDFACDIYIWAPLAGTCGVLLLSLVITLYCKRGRKKLLYIFKQPFMRPVQTTQEEDGCSCRFPEEEEGGCELRVKFSRSADAPAYKQGQNQLYNELNLGRREEYDVLDKRRGRDPEMGGKPRRKNPQEGLYNELQKDKMAEAYSEIGMKGERRRGKGHDGLYQGLSTATKDTYDALHMQALPPR

SEQ ID NO: 6962 - protein, 492 aa, Artificial Sequence; identical to SEQ ID NO: 6932
  source: /note="Description of Artificial Sequence: Synthetic Chimeric Antigen Receptor"

SEQ ID NO: 6963 - protein, 212 aa, Artificial Sequence
  source: /note="Description of Artificial Sequence: Synthetic Chimeric Antigen Receptor"
MALPVTALLLPLALLLHAARPEVQLVETGGGLVQPGGSLRLSCAASGFTFSSYAMSWVRQAPGKGLEWVSAISGSGGSTYYADSVKGRFTISRDNSKNTLYLQMNTLKAEDTAVYYCARATYKRELRYYYGMDVWGQGTTVTVSSGGGGSGGGGSGGGGSEIVLTQSPSTLSLSPGESATLSCRASQSVSTTFLAWYQQKPGQAPRLLIYGS

SEQ ID NO: 6964 - protein, 483 aa, Artificial Sequence; identical to SEQ ID NO: 6927
  source: /note="Description of Artificial Sequence: Synthetic Chimeric Antigen Receptor"

SEQ ID NO: 6965 - protein, 490 aa, Artificial Sequence
  source: /note="Description of Artificial Sequence: Synthetic Chimeric Antigen Receptor"
MALPVTALLLPLALLLHAARPEVQLVESGGGLVQPGRSLRLSCTASGFTFDDYAMHWVRQRPGKGLEWVASINWKGNSLAYGDSVKGRFAISRDNAKNTVFLQMNSLRTEDTAVYYCASHQGVAYYNYAMDVWGRGTLVTVSSGGGGSGGGGSGGGGSEIVLTQSPGTLSLSPGERATLSCRATQSIGSSFLAWYQQRPGQAPRLLIYGASQRATGIPDRFSGRGSGTDFTLTISRVEPEDSAVYYCQHYESSPSWTFGQGTKVEIKTTTPAPRPPTPAPTIASQPLSLRPEACRPAAGGAVHTRGLDFACDIYIWAPLAGTCGVLLLSLVITLYCKRGRKKLLYIFKQPFMRPVQTTQEEDGCSCRFPEEEEGGCELRVKFSRSADAPAYKQGQNQLYNELNLGRREEYDVLDKRRGRDPEMGGKPRRKNPQEGLYNELQKDKMAEAYSEIGMKGERRRGKGHDGLYQGLSTATKDTYDALHMQALPPR

SEQ ID NO: 6966 - protein, 485 aa, Artificial Sequence
  source: /note="Description of Artificial Sequence: Synthetic Chimeric Antigen Receptor"
MALPVTALLLPLALLLHAARPEVQLVESGGGLVQPGGSLRLSCAASGFTFSSYAMSWVRQAPGKGLEWVSAISGSGGSTYYADSVKGRFTISRDNSKNTLYLQMNSLRAEDTAVYYCAKVVRDGMDVWGQGTTVTVSSGGGGSGGGGSGGGGSEIVLTQSPATLSLSPGERATLSCRASQSVSSSYLAWYQQKPGQAPRLLIYGASSRATGIPDRFSGNGSGTDFTLTISRLEPEDFAVYYCQQYGSPPRFTFGPGTKVDIKTTTPAPRPPTPAPTIASQPLSLRPEACRPAAGGAVHTRGLDFACDIYIWAPLAGTCGVLLLSLVITLYCKRGRKKLLYIFKQPFMRPVQTTQEEDGCSCRFPEEEEGGCELRVKFSRSADAPAYKQGQNQLYNELNLGRREEYDVLDKRRGRDPEMGGKPRRKNPQEGLYNELQKDKMAEAYSEIGMKGERRRGKGHDGLYQGLSTATKDTYDALHMQALPPR

SEQ ID NO: 6967 - protein, 486 aa, Artificial Sequence; identical to SEQ ID NO: 6934
  source: /note="Description of Artificial Sequence: Synthetic Chimeric Antigen Receptor"

SEQ ID NO: 6968 - protein, 492 aa, Artificial Sequence
  source: /note="Description of Artificial Sequence: Synthetic Chimeric Antigen Receptor"
MALPVTALLLPLALLLHAARPEVQLVETGGGLVQPGGSLRLSCAASGFTFSSYAMSWVRQAPGKGLEWVSAISGSGGSTYYADSVKGRFTMSRENDKNSVFLQMNSLRVEDTGVYYCARANYKRELRYYYGMDVWGQGTMVTVSSGGGGSGGGGSGGGGSEIVMTQSPGTLSLSPGESATLSCRASQRVASNYLAWYQHKPGQAPSLLISGASSRATGVPDRFSGSGSGTDFTLAISRLEPEDSAVYYCQHYDSSPSWTFGQGTKVEIKTTTPAPRPPTPAPTIASQPLSLRPEACRPAAGGAVHTRGLDFACDIYIWAPLAGTCGVLLLSLVITLYCKRGRKKLLYIFKQPFMRPVQTTQEEDGCSCRFPEEEEGGCELRVKFSRSADAPAYKQGQNQLYNELNLGRREEYDVLDKRRGRDPEMGGKPRRKNPQEGLYNELQKDKMAEAYSEIGMKGERRRGKGHDGLYQGLSTATKDTYDALHMQALPPR

SEQ ID NO: 6969 - protein, 488 aa, Artificial Sequence; identical to SEQ ID NO: 6928
  source: /note="Description of Artificial Sequence: Synthetic Chimeric Antigen Receptor"

SEQ ID NO: 6970 - protein, 488 aa, Artificial Sequence; identical to SEQ ID NO: 6933
  source: /note="Description of Artificial Sequence: Synthetic Chimeric Antigen Receptor"

SEQ ID NO: 6971 - protein, 495 aa, Artificial Sequence; identical to SEQ ID NO: 6936
  source: /note="Description of Artificial Sequence: Synthetic Chimeric Antigen Receptor"

SEQ ID NO: 6972 - protein, 490 aa, Artificial Sequence; identical to SEQ ID NO: 6930
  source: /note="Description of Artificial Sequence: Synthetic Chimeric Antigen Receptor"

SEQ ID NO: 6973 - protein, 467 aa, Artificial Sequence
  source: /note="Description of Artificial Sequence: Synthetic Chimeric Antigen Receptor"
QIQLVQSGPDLKKPGETVKLSCKASGYTFTNFGMNWVKQAPGKGFKWMAWINTYTGESYFADDFKGRFAFSVETSATTAYLQINNLKTEDTATYFCARGEIYYGYDGGFAYWGQGTLVTVSAGGGGSGGGGSGGGGSDVVMTQSHRFMSTSVGDRVSITCRASQDVNTAVSWYQQKPGQSPKLLIFSASYRYTGVPDRFTGSGSGADFTLTISSVQAEDLAVYYCQQHYSTPWTFGGGTKLDIKTTTPAPRPPTPAPTIASQPLSLRPEACRPAAGGAVHTRGLDFACDIYIWAPLAGTCGVLLLSLVITLYCKRGRKKLLYIFKQPFMRPVQTTQEEDGCSCRFPEEEEGGCELRVKFSRSADAPAYKQGQNQLYNELNLGRREEYDVLDKRRGRDPEMGGKPRRKNPQEGLYNELQKDKMAEAYSEIGMKGERRRGKGHDGLYQGLSTATKDTYDALHMQALPPR

SEQ ID NO: 6974 - protein, 472 aa, Artificial Sequence
  source: /note="Description of Artificial Sequence: Synthetic Chimeric Antigen Receptor"
QIQLVQSGPELKKPGETVKISCKASGYTFTDYSINWVKRAPGKGLKWMGWINTETREPAYAYDFRGRFAFSLETSASTAYLQINNLKYEDTATYFCALDYSYAMDYWGQGTSVTVSSGGGGSGGGGSGGGGSQIQLVQSGPELKKPGETVKISCKASGYTFTDYSINWVKRAPGKGLKWMGWINTETREPAYAYDFRGRFAFSLETSASTAYLQINNLKYEDTATYFCALDYSYAMDYWGQGTSVTVSSTTTPAPRPPTPAPTIASQPLSLRPEACRPAAGGAVHTRGLDFACDIYIWAPLAGTCGVLLLSLVITLYCKRGRKKLLYIFKQPFMRPVQTTQEEDGCSCRFPEEEEGGCELRVKFSRSADAPAYKQGQNQLYNELNLGRREEYDVLDKRRGRDPEMGGKPRRKNPQEGLYNELQKDKMAEAYSEIGMKGERRRGKGHDGLYQGLSTATKDTYDALHMQALPPR

SEQ ID NO: 6975 - protein, 466 aa, Artificial Sequence
  source: /note="Description of Artificial Sequence: Synthetic Chimeric Antigen Receptor"
QIQLVQSGPELKKPGETVKISCKASGYTFRHYSMNWVKQAPGKGLKWMGRINTESGVPIYADDFKGRFAFSVETSASTAYLVINNLKDEDTASYFCSNDYLYSLDFWGQGTALTVSSGGGGSGGGGSGGGGSDIVLTQSPPSLAMSLGKRATISCRASESVTILGSHLIYWYQQKPGQPPTLLIQLASNVQTGVPARFSGSGSRTDFTLTIDPVEEDDVAVYYCLQSRTIPRTFGGGTKLEIKTTTPAPRPPTPAPTIASQPLSLRPEACRPAAGGAVHTRGLDFACDIYIWAPLAGTCGVLLLSLVITLYCKRGRKKLLYIFKQPFMRPVQTTQEEDGCSCRFPEEEEGGCELRVKFSRSADAPAYKQGQNQLYNELNLGRREEYDVLDKRRGRDPEMGGKPRRKNPQEGLYNELQKDKMAEAYSEIGMKGERRRGKGHDGLYQGLSTATKDTYDALHMQALPPR

SEQ ID NO: 6976 - protein, 466 aa, Artificial Sequence
  source: /note="Description of Artificial Sequence: Synthetic Chimeric Antigen Receptor"
QIQLVQSGPELKKPGETVKISCKASGYTFTHYSMNWVKQAPGKGLKWMGRINTETGEPLYADDFKGRFAFSLETSASTAYLVINNLKNEDTATFFCSNDYLYSCDYWGQGTTLTVSSGGGGSGGGGSGGGGSDIVLTQSPPSLAMSLGKRATISCRASESVTILGSHLIYWYQQKPGQPPTLLIQLASNVQTGVPARFSGSGSRTDFTLTIDPVEEDDVAVYYCLQSRTIPRTFGGGTKLEIKTTTPAPRPPTPAPTIASQPLSLRPEACRPAAGGAVHTRGLDFACDIYIWAPLAGTCGVLLLSLVITLYCKRGRKKLLYIFKQPFMRPVQTTQEEDGCSCRFPEEEEGGCELRVKFSRSADAPAYKQGQNQLYNELNLGRREEYDVLDKRRGRDPEMGGKPRRKNPQEGLYNELQKDKMAEAYSEIGMKGERRRGKGHDGLYQGLSTATKDTYDALHMQALPPR

SEQ ID NO: 6977 - protein, 466 aa, Artificial Sequence; identical to SEQ ID NO: 6976
  source: /note="Description of Artificial Sequence: Synthetic Chimeric Antigen Receptor"

SEQ ID NO: 6978 - protein, 422 aa, Artificial Sequence
  source: /note="Description of Artificial Sequence: Synthetic Chimeric Antigen Receptor"
METDTLLLWVLLLWVPGSTGSVLHLVPINATSKDDSDVTEVMWQPALRRGRGLQAQGYGVRIQDAGVYLLYSQVLFQDVTFTMGQVVSREGQGRQETLFRCIRSMPSHPDRAYNSCYSAGVFHLHQGDILSVIIPRARAKLNLSPHGTFLGFVKLSGGGSDPTTTPAPRPPTPAPTIASQPLSLRPEACRPAAGGAVHTRGLDFACDIFWVLVVVGGVLACYSLLVTVAFIIFWVRSKRSRLLHSDYMNMTPRRPGPTRKHYQPYAPPRDFAAYRSRDQRLPPDAHKPPGGGSFRTPIQEEQADAHSTLAKIRVKFSRSADAPAYQQGQNQLYNELNLGRREEYDVLDKRRGRDPEMGGKPRRKNPQEGLYNELQKDKAEAYSEIGMKGERRRGKGHDGLYQGLSTATKDYDALHMQALPPR

SEQ ID NO: 6979 - protein, 394 aa, Artificial Sequence
  source: /note="Description of Artificial Sequence: Synthetic Chimeric Antigen Receptor"
METDTLLLWVLLLWVPGSTGSVLHLVPINATSKDDSDVTEVMWQPALRRGRGLQAQGYGVRIQDAGVYLLYSQVLFQDVTFTMGQVVSREGQGRQETLFRCIRSMPSHPDRAYNSCYSAGVFHLHQGDILSVIIPRARAKLNLSPHGTFLGFVLSGGGSDPAEPKSPDKTHTCPPCPDPFWVLWVGGVLACYSLLVTVAFIIFWVRSKRSRLLHSDYMNMTPRRPGPTRKHYQPYAPPRDFAAYRSRDQRLPPDAHKPPGGGSFRTPIQEEQADAHSTLAKIRVKFSRSADAPAYQQGQNQLYNELNLGRREEYDVLDKRRGRDPEMGGKPRRKNPQEGLYNELQKDKMAEAYSEIGMKGERRRGKGHDGLYQGLSTATKDTYDALHMQALPPR

SEQ ID NO: 6980 - protein, 630 aa, Artificial Sequence
  source: /note="Description of Artificial Sequence: Synthetic Chimeric Antigen Receptor"
MGTSLLCWMALCLLGADHADGKPIPNPLLGLDSTSGGGGSVLHLVPINATSKDDSDVTEVMWQPALRRGRGLQAQGYGVRIQDAGVYLLYSQVLFQDVTFTMGQVVSREGQGRQETLFRCIRSMPSHPDRAYNSCYSAGVFHLHQGDILSVIIPRARAKLNLSPHGTFLGFVKLSGGGSDPAEPKSPDKTHTCPPCPAPPVAGPSVFLFPPKPKDTLMIARTPEVTCVVVDVSHEDPEVKFNWYVDGVEVHNAKTKPREEQYNSTYRVVSVLTVLHQDWLNGKEYKCKVSNKALPAPIEKTISKAKGQPREPQVYTLPPSRDELTKNQVSLTCLVKGFYPSDIAVEWESNGQPENNYKTTPPVLDSDGSFFLYSKLTVDKSRWQQGNVFSCSVHEALHNHYTQKSLSLSPGKKDPKFWVLWVGGVLACYSLLVTVAFIIFWVRSKRSRLLHSDYMNMTPRRPGPTRKHYQPYAPPRDFAAYRSRDQRLPPDAHKPPGGGSFRTPIQEEQADAHSTLAKIRVKFSRSADAPAYQQGQNQLYNELNLGRREEYDVLDKRRGRDPEGGKPRRKNPQEGLYNELQKDKMAEAYSEIGMKGERRRGKGHDGLYQGLSTATKDTYDALHMQALPPR

SEQ ID NO: 6981 - protein, 438 aa, Artificial Sequence
  source: /note="Description of Artificial Sequence: Synthetic Chimeric Antigen Receptor"
MGTSLLCMALCLLGADHADGKPIPNPLLGLDSTSGGGGSVLHLVPINATSKDDSDVTEVMWQPALRRGRGLQAQGYGVRIQDAGVYLLYSQVLFQDVTFTMGQWSREGQGRQETLFRCIRSMPSHPDRAYNSCYSAGVFHLHQGDILSIIPRARAKLNLSPHGTFLGFVKLSGGGSDPTTTPAPRPPTPAPTIASQPLSLRPEACRPAAGGAVHTRGLDFACDIFWVLWVGGVLACYSLLVTVAFIIFWVRSKRSRLLHSDYMNMTPRRPGPTRKHYQPYAPPRDFAAYRSRDQRLPPDAHKPPGGGSFRTPIQEEQADAHSTLAKIRVKFSRSADAPAYQQGQNQLYNELNLGRREEYDVLDKRRGRDPEMGGKPRRKNPQEGLYNELQKDKMAEAYSEIGMKGERRRGKGHDGLYQGLSATKDTYDALHMQALPPR

SEQ ID NO: 6982 - protein, 416 aa, Artificial Sequence
  source: /note="Description of Artificial Sequence: Synthetic Chimeric Antigen Receptor"
MGTSLLCWMALCLLGADHADGKPIPNPLLGLDSTSGGGGSVLHLVPINATSKDDSDVTEVMWQPALRRGRGLQAQGYGVRIQDAGVYLLYSQVLFQDVTFTMGQVVSREGQGRQETLFRCIRSMPSHPDRAYNSCYSAGVFHLHQGDILSVIIPRARAKLNLSPHGTFLGFVKLSGGGSDPAEPKSPDKTHTCPPCPKDPKFWVLVVVGGVLACYSLLVTVAFIIFVRSKRSRLLHSDYMNMTPRRPGPTRKHYQPYAPPRDFAAYRSRDQRLPPDAHKPPGGGSFRTPIQEEQADAHSTLAKIRVKFSRSADAPAYQQGQNQLYNELNLGRREEYDVLDKRRGRDPEMGGKPRRKNPQEGLYNELQKDKMAEAYSEIGMKGERRRGKGHDGLYQGLSTATKDTYDALHMQALPPR

SEQ ID NO: 6983 - protein, 614 aa, Artificial Sequence; identical to SEQ ID NO: 6864
  source: /note="Description of Artificial Sequence: Synthetic Chimeric Antigen Receptor"

SEQ ID NO: 6984 - protein, 424 aa, Artificial Sequence
  source: /note="Description of Artificial Sequence: Synthetic Chimeric Antigen Receptor"
METDTLLLWVLLLWVPGSTGSVLHLVPINATSKDDSDVTEVMWQPALRRGRGLQAQGYGVRIQDAGVYLLYSQVLFQDVTFTMGQVVSREGQGRQETLFRCIRSMPSHPDRAYNSCYSAGVFHLHQGDILSVIIPRARAKLNLSPHGTFLGFVKLSGGGSDPTTTPAPRPPTPAPTIASQPLSLRPEACRPAAGGAVHTRGLDFACDIFWVLVVVGGVLACYSLLVTVAFIIFWVRSKRSRLLHSDYMNMTPRRPGPTRKHYQPYAPPRDFAAYRSRDQRLPPDAHKPPGGGSFRTPIQEEQADAHSTLAKIRVKFSRSADAPAYQQGQNQLYNELNLGRREEYDVLDKRRGRDPEMGGKPRRKNPQEGLYNELQKDKMAEAYSEIGMKGERRRGKGHDGLYQGLSTATKDTYDALHMQALPPR

SEQ ID NO: 6985 - protein, 398 aa, Artificial Sequence; identical to SEQ ID NO: 6863
  source: /note="Description of Artificial Sequence: Synthetic Chimeric Antigen Receptor"

SEQ ID NO: 6986 - protein, 633 aa, Artificial Sequence
  source: /note="Description of Artificial Sequence: Synthetic Chimeric Antigen Receptor"
MGTSLLCWMALCLLGADHADGKPIPNPLLGLDSTSGGGGSVLHLVPINATSKDDSDVTEVMWQPALRRGRGLQAQGYGVRIQDAGVYLLYSQVLFQDVTFTMGQVVSREGQGRQETLFRCIRSMPSHPDRAYNSCYSAGVEHLHQGDILSVIIPRARAKLNLSPHGTFLGFVKLSGGGSDPAEPKSPDKTHTCPPCPAPPVAGPSVFLFPPKPKDTLMIARTPEVTCVVVDVSHEDPEVKFNWYVDGVEVHNAKTKPREEQYNSTYRVVSVLTVLHQDWLNGKEYKCKVSNKALPAPIEKTISKAKGQPREPQVYTLPPSRDELTKNQVSLTCLVKGFYPSDIAVEWESNGQPENNYKTTPPVLDSDGSFFLYSKLTVDKSRWQQGNVFSCSVMHEALHNHYTQKSLSLSPGKKDPKFWVLVVVGGVLACYSLLVTVAFIIFWVRSKRSRLLHSDYMNMTPRRPGPTRKHYQPYAPPRDFAAYRSRDQRLPPDAHKPPGGGSFRTPIQEEQADAHSTLAKIRVKFSRSADAPAYQQGQNQLYNELNLGRREEYDVLDKRRGRDPEMGGKPRRKNPQEGLYNELQKDKMAEAYSEIGMKGERRRGKGHDGLYQGLSTATKDTYDALHMQALPPR

SEQ ID NO: 6987 - protein, 443 aa, Artificial Sequence
  source: /note="Description of Artificial Sequence: Synthetic Chimeric Antigen Receptor"
MGTSLLCWMALCLLGADHADGKPIPNPLLGLDSTSGGGGSVLHLVPINATSKDDSDVTEVMWQPALRRGRGLQAQGYGVRIQDAGVYLLYSQVLFQDVTFTMGQVVSREGQGRQETLFRCIRSMPSHPDRAYNSCYSAGVFHLHQGDILSVIIPRARAKLNLSPHGTFLGFVKLSGGGSDPTTTPAPRPPTPAPTIASQPLSLRPEACRPAAGGAVHTRGLDFACDIFWVLVVVGGVLACYSLLVTVAFIIFWVRSKRSRLLHSDYMNMTPRRPGPTRKHYQPYAPPRDFAAYRSRDQRLPPDAHKPPGGGSFRTPIQEEQADAHSTLAKIRVKFSRSADAPAYQQGQNQLYNELNLGRREEYDVLDKRRGRDPEMGGKPRRKNPQEGLYNELQKDKMAEAYSEIGMKGERRRGKGHDGLYQGLSTATKDTYDALHMQALPPR

SEQ ID NO: 6988 - protein, 417 aa, Artificial Sequence
  source: /note="Description of Artificial Sequence: Synthetic Chimeric Antigen Receptor"
MGTSLLCWMALCLLGADHADGKPIPNPLLGLDSTSGGGGSVLHLVPINATSKDDSDVTEVMWQPALRRGRGLQAQGYGVRIQDAGVYLLYSQVLFQDVTFTMGQVVSREGQGRQETLFRCIRSMPSHPDRAYNSCYSAGVFHLHQGDILSVIIPRARAKLNLSPHGTFLGFVKLSGGGSDPAEPKSPDKTHTCPPCPKDPKFWVLVVVGGVLACYSLLVTVAFIIFWVRSKRSRLLHSDYMNMTPRRPGPTRKHYQPYAPPRDFAAYRSRDQRLPPDAHKPPGGGSFRTPIQEEQADAHSTLAKIRVKFSRSADAPAYQQGQNQLYNELNLGRREEYDVLDKRRGRDPEMGGKPRRKNPQEGLYNELQKDKMAEAYSEIGMKGERRRGKGHDGLYQGLSTATKDTYDALHMQALPPR

SEQ ID NO: 6989 - protein, 391 aa, Artificial Sequence
  source: /note="Description of Artificial Sequence: Synthetic Chimeric Antigen Receptor"
MALPVTALLLPLALLLHAARPGSGSGAQAAQVQLVQSGAEVKKPGASVKVSCKASGYSFPDYYINWVRQAPGQGLEWMGWIYFASGNSEYNQKFTGRVTMTRDTSSSTAYMELSSLRSEDTAVYFCASLYDYDWYFDVWGQGTMVTVSSGGGGSGGGGSGGGGSDIVMTQTPLSLSVTPGEPASISCKSSQSLVHSNGNTYLHWYLQKPGQSPQLLIYKVSNRFSGVPDRFSGSGSGADFTLKISRVEAEDVGVYYCAETSHVPWTFGQGTKLEIKRSDPASGAGSGSGSAIELLPVPGAKKSAKLYIPYIILTIIILTIVGFIWLLKVNGCRKYKLNKTESTPVVEEDEMQPYASYTEKNNPLYDTTNKVKASEALQSEVDTDLHTLSHG

SEQ ID NO: 6990 - protein, 503 aa, Artificial Sequence
  source: /note="Description of Artificial Sequence: Synthetic Chimeric Antigen Receptor"
MALPVTALLLPLALLLHAARPDIVLTQSPPSLAMSLGKRATISCRASESVTILGSHLIYWYQQKPGQPPTLLIQLASNVQTGVPARFSGSGSRTDFTLTIDPVEEDDVAVYYCLQSRTIPRTFGGGTKLEIKGSTSGSGKPGSGEGSTKGQIQLVQSGPELKKPGETVKISCKASGYTFRHYSMNWVKQAPGKGLKWMGRINTESGVPIYADDFKGRFAFSVETSASTAYLVINNLKDEDTASYFCSNDYLYSLDFWGQGTALTVSSFVPVFLPAKPTTTPAPRPPTPAPTIASQPLSLRPEACRPAAGGAVHTRGLDFACDIYIWAPLAGTCGVLLLSLVITLYCNHRNRSKRSRLLHSDYMNMTPRRPGPTRKHYQPYAPPRDFAAYRSRVKFSRSADAPAYQQGQNQLYNELNLGRREEYDVLDKRRGRDPEMGGKPRRKNPQEGLYNELQKDKMAEAYSEIGMKGERRRGKGHDGLYQGLSTATKDTYDALHMQALPPR

SEQ ID NO: 6991 - protein, 503 aa, Artificial Sequence
  source: /note="Description of Artificial Sequence: Synthetic Chimeric Antigen Receptor"
MALPVTALLLPLALLLHAARPDIVLTQSPPSLAMSLGKRATISCRASESVTILGSHLIHWYQQKPGQPPTLLIQLASNVQTGVPARFSGSGSRTDFTLTIDPVEEDDVAVYYCLQSRTIPRTFGGGTKLEIKGSTSGSGKPGSGEGSTKGQIQLVQSGPELKKPGETVKISCKASGYTFTDYSINWVKRAPGKGLKWMGWINTETREPAYAYDFRGRFAFSLETSASTAYLQINNLKYEDTATYFCALDYSYAMDYWGQGTSVTVSSFVPVFLPAKPTTTPAPRPPTPAPTIASQPLSLRPEACRPAAGGAVHTRGLDFACDIYIWAPLAGTCGVLLLSLVITLYCNHRNRSKRSRLLHSDYMNMTPRRPGPTRKHYQPYAPPRDFAAYRSRVKFSRSADAPAYQQGQNQLYNELNLGRREEYDVLDKRRGRDPEMGGKPRRKNPQEGLYNELQKDKMAEAYSEIGMKGERRRGKGHDGLYQGLSTATKDTYDALHMQALPPR

SEQ ID NO: 6992 - protein, 503 aa, Artificial Sequence
  source: /note="Description of Artificial Sequence: Synthetic Chimeric Antigen Receptor"
MALPVTALLLPLALLLHAARPDIVLTQSPPSLAMSLGKRATISCRASESVTILGSHLIYWYQQKPGQPPTLLIQLASNVQTGVPARFSGSGSRTDFTLTIDPVEEDDVAVYYCLQSRTIPRTFGGGTKLEIKGSTSGSGKPGSGEGSTKGQIQLVQSGPELKKPGETVKISCKASGYTFTHYSMNWVKQAPGKGLKWMGRINTETGEPLYADDFKGRFAFSLETSASTAYLVINNLKNEDTATFFCSNDYLYSCDYWGQGTTLTVSSFVPVFLPAKPTTTPAPRPPTPAPTIASQPLSLRPEACRPAAGGAVHTRGLDFACDIYIWAPLAGTCGVLLLSLVITLYCNHRNRSKRSRLLHSDYMNMTPRRPGPTRKHYQPYAPPRDFAAYRSRVKFSRSADAPAYQQGQNQLYNELNLGRREEYDVLDKRRGRDPEMGGKPRRKNPQEGLYNELQKDKMAEAYSEIGMKGERRRGKGHDGLYQGLSTATKDTYDALHMQALPPR

SEQ ID NO: 6993 - protein, 507 aa, Artificial Sequence
  source: /note="Description of Artificial Sequence: Synthetic Chimeric Antigen Receptor"
MLLLVTSLLLCELPHPAFLLIPDIVLTQSPPSLAMSLGKRATISCRASESVTILGSHLIHWYQQKPGQPPTLLIQLASNVQTGVPARFSGSGSRTDFTLTIDPVEEDDVAVYYCLQSRTIPRTFGGGTKLEIKGSTSGSGKPGSGEGSTKGQIQLVQSGPELKKPGETVKISCKASGYTFTDYSINWVKRAPGKGLKWMGWINTETREPAYAYDFRGRFAFSLETSASTAYLQINNLKYEDTATYFCALDYSYAMDYWGQGTSVTVSSAAAFVPVFLPAKPTTTPAPRPPTPAPTIASQPLSLRPEACRPAAGGAVHTRGLDFACDIYIWAPLAGTCGVLLLSLVITLYCNHRNRSKRSRLLHSDYMNMTPRRPGPTRKHYQPYAPPRDFAAYRSRVKFSRSADAPAYQQGQNQLYNELNLGRREEYDVLDKRRGRDPEMGGKPRRKNPQEGLYNELQKDKMAEAYSEIGMKGERRRGKGHDGLYQGLSTATKDTYDALHMQALPPR

SEQ ID NO: 6994 - protein, 506 aa, Artificial Sequence
  source: /note="Description of Artificial Sequence: Synthetic Chimeric Antigen Receptor"
MALPVTALLLPLALLLHAARPDIVLTQSPPSLAMSLGKRATISCRASESVTILGSHLIHWYQQKPGQPPTLLIQLASNVQTGVPARFSGSGSRTDFTLTIDPVEEDDVAVYYCLQSRTIPRTFGGGTKLEIKGSTSGSGKPGSGEGSTKGQIQLVQSGPELKKPGETVKISCKASGYTFTDYSINWVKRAPGKGLKWMGWINTETREPAYAYDFRGRFAFSLETSASTAYLQINNLKYEDTATYFCALDYSYAMDYWGQGTSVTVSSAAAFVPVFLPAKPTTTPAPRPPTPAPTIASQPLSLRPEACRPAAGGAVHTRGLDFACDIYIWAPLAGTCGVLLLSLVITLYCNHRNRSKRSRLLHSDYMNMTPRRPGPTRKHYQPYAPPRDFAAYRSRVKFSRSADAPAYQQGQNQLYNELNLGRREEYDVLDKRRGRDPEMGGKPRRKNPQEGLYNELQKDKMAEAYSEIGMKGERRRGKGHDGLYQGLSTATKDTYDALHMQALPPR

SEQ ID NO: 6995 - protein, 512 aa, Artificial Sequence
  source: /note="Description of Artificial Sequence: Synthetic Chimeric Antigen Receptor"
MALPVTALLLPLALLLHAARPDIVLTQSPPSLAMSLGKRATISCRASESVTILGSHLIHWYQQKPGQPPTLLIQLASNVQTGVPARFSGSGSRTDFTLTIDPVEEDDVAVYYCLQSRTIPRTFGGGTKLEIKGSTSGSGKPGSGEGSTKGQIQLVQSGPELKKPGETVKISCKASGYTFTDYSINWVKRAPGKGLKWMGWINTETREPAYAYDFRGRFAFSLETSASTAYLQINNLKYEDTATYFCALDYSYAMDYWGQGTSVTVSSAAAFVPVFLPAKPTTTPAPRPPTPAPTIASQPLSLRPEACRPAAGGAVHTRGLDFACDIYIWAPLAGTCGVLLLSLVITLYCNHRNRFSVVKRGRKKLLYIFKQPFMRPVQTTQEEDGCSCRFPEEEEGGCELRVKFSRSADAPAYQQGQNQLYNELNLGRREEYDVLDKRRGRDPEMGGKPRRKNPQEGLYNELQKDKMAEAYSEIGMKGERRRGKGHDGLYQGLSTATKDTYDALHMQALPPR

SEQ ID NO: 6996 - protein, 502 aa, Artificial Sequence
  source: /note="Description of Artificial Sequence: Synthetic Chimeric Antigen Receptor"
MALPVTALLLPLALLLHAARPDIVLTQSPPSLAMSLGKRATISCRASESVTILGSHLIHWYQQKPGQPPTLLIQLASNVQTGVPARFSGSGSRTDFTLTIDPVEEDDVAVYYCLQSRTIPRTFGGGTKLEIKGSTSGSGKPGSGEGSTKGQIQLVQSGPELKKPGETVKISCKASGYTFTDYSINWVKRAPGKGLKWMGWINTETREPAYAYDFRGRFAFSLETSASTAYLQINNLKYEDTATYFCALDYSYAMDYWGQGTSVTVSSAAAFVPVFLPAKPTTTPAPRPPTPAPTIASQPLSLRPEACRPAAGGAVHTRGLDFACDIYIWAPLAGTCGVLLLSLVITLYCNHRNRRDQRLPPDAHKPPGGGSFRTPIQEEQADAHSTLAKIRVKFSRSADAPAYQQGQNQLYNELNLGRREEYDVLDKRRGRDPEMGGKPRRKNPQEGLYNELQKDKMAEAYSEIGMKGERRRGKGHDGLYQGLSTATKDTYDALHMQALPPR

SEQ ID NO: 6997 - protein, 549 aa, Artificial Sequence
  source: /note="Description of Artificial Sequence: Synthetic Chimeric Antigen Receptor"
MALPVTALLLPLALLLHAARPDIVLTQSPPSLAMSLGKRATISCRASESVTILGSHLIHWYQQKPGQPPTLLIQLASNVQTGVPARFSGSGSRTDFTLTIDPVEEDDVAVYYCLQSRTIPRTFGGGTKLEIKGSTSGSGKPGSGEGSTKGQIQLVQSGPELKKPGETVKISCKASGYTFTDYSINWVKRAPGKGLKWMGWINTETREPAYAYDFRGRFAFSLETSASTAYLQINNLKYEDTATYFCALDYSYAMDYWGQGTSVTVSSAAAFVPVFLPAKPTTTPAPRPPTPAPTIASQPLSLRPEACRPAAGGAVHTRGLDFACDIYIWAPLAGTCGVLLLSLVITLYCNHRNRFSVVKRGRKKLLYIFKQPFMRPVQTTQEEDGCSCRFPEEEEGGCELRRDQRLPPDAHKPPGGGSFRTPIQEEQADAHSTLAKIRVKFSRSADAPAYQQGQNQLYNELNLGRREEYDVLDKRRGRDPEMGGKPRRKNPQEGLYNELQKDKMAEAYSEIGMKGERRRGKGHDGLYQGLSTATKDTYDALHMQALPPR

SEQ ID NO: 6998 - protein, 493 aa, Artificial Sequence
  source: /note="Description of Artificial Sequence: Synthetic Chimeric Antigen Receptor"
MALPVTALLLPLALLLHAARPDIVLTQSPASLAVSLGERATINCRASESVSVIGAHLIHWYQQKPGQPPKLLIYLASNLETGVPARFSGSGSGTDFTLTISSLQAEDAAIYYCLQSRIFPRTFGQGTKLEIKGSTSGSGKPGSGEGSTKGQVQLVQSGSELKKPGASVKVSCKASGYTFTDYSINWVRQAPGQGLEWMGWINTETREPAYAYDFRGRFVFSLDTSVSTAYLQISSLKAEDTAVYYCARDYSYAMDYWGQGTLVTVSSAAATTTPAPRPPTPAPTIASQPLSLRPEACRPAAGGAVHTRGLDFACDIYIWAPLAGTCGVLLLSLVITLYCKRGRKKLLYIFKQPFMRPVQTTQEEDGCSCRFPEEEEGGCELRVKFSRSADAPAYQQGQNQLYNELNLGRREEYDVLDKRRGRDPEMGGKPRRKNPQEGLYNELQKDKMAEAYSEIGMKGERRRGKGHDGLYQGLSTATKDTYDALHMQALPPR

SEQ ID NO: 6999 - protein, 493 aa, Artificial Sequence
  source: /note="Description of Artificial Sequence: Synthetic Chimeric Antigen Receptor"
MALPVTALLLPLALLLHAARPDIVLTQSPASLAVSLGERATINCRASESVSVIGAHLIHWYQQKPGQPPKLLIYLASNLETGVPARFSGSGSGTDFTLTISSLQAEDAAIYYCLQSRIFPRTFGQGTKLEIKGSTSGSGKPGSGEGSTKGQVQLVQSGSELKKPGESVKVSCKASGYTFTDYSINWVRQAPGQGLEWMGWINTETREPAYAYDFRGRFVFSLDTSVSTAYLQISSLKAEDTAVYYCALDYSYAMDYWGQGTLVTVSSAAATTTPAPRPPTPAPTIASQPLSLRPEACRPAAGGAVHTRGLDFACDIYIWAPLAGTCGVLLLSLVITLYCKRGRKKLLYIFKQPFMRPVQTTQEEDGCSCRFPEEEEGGCELRVKFSRSADAPAYQQGQNQLYNELNLGRREEYDVLDKRRGRDPEMGGKPRRKNPQEGLYNELQKDKMAEAYSEIGMKGERRRGKGHDGLYQGLSTATKDTYDALHMQALPPR

SEQ ID NO: 7000 - protein, 493 aa, Artificial Sequence
  source: /note="Description of Artificial Sequence: Synthetic Chimeric Antigen Receptor"
MALPVTALLLPLALLLHAARPDIVLTQSPASLAVSLGERATINCRASESVSVIGAHLIHWYQQKPGQPPKLLIYLASNLETGVPARFSGSGSGTDFTLTISSLQAEDAAIYYCLQSRIFPRTFGQGTKLEIKGSTSGSGKPGSGEGSTKGQVQLVQSGSELKKPGESVKISCKASGYTFTDYSINWVRQAPGQGLEWMGWINTETREPAYAYDFRGRFVFSLDTSASTAYLQISSLKAEDTAVYFCALDYSYAMDYWGQGTLVTVSSAAATTTPAPRPPTPAPTIASQPLSLRPEACRPAAGGAVHTRGLDFACDIYIWAPLAGTCGVLLLSLVITLYCKRGRKKLLYIFKQPFMRPVQTTQEEDGCSCRFPEEEEGGCELRVKFSRSADAPAYQQGQNQLYNELNLGRREEYDVLDKRRGRDPEMGGKPRRKNPQEGLYNELQKDKMAEAYSEIGMKGERRRGKGHDGLYQGLSTATKDTYDALHMQALPPR

SEQ ID NO: 7001 - protein, 493 aa, Artificial Sequence
  source: /note="Description of Artificial Sequence: Synthetic Chimeric Antigen Receptor"
MALPVTALLLPLALLLHAARPDIVLTQSPASLAVSLGERATINCRASESVSVIGAHLIHWYQQKPGQPPKLLIYLASNLETGVPARFSGSGSGTDFTLTISSLQAEDAAIYYCLQSRIFPRTFGQGTKLEIKGSTSGSGKPGSGEGSTKGQVQLVQSGSELKKPGESVKISCKASGYTFTDYSINWVKQAPGQGLKWMGWINTETREPAYAYDFRGRFVFSLDTSASTAYLQISSLKAEDTAVYFCALDYSYAMDYWGQGTLVTVSSAAATTTPAPRPPTPAPTIASQPLSLRPEACRPAAGGAVHTRGLDFACDIYIWAPLAGTCGVLLLSLVITLYCKRGRKKLLYIFKQPFMRPVQTTQEEDGCSCRFPEEEEGGCELRVKFSRSADAPAYQQGQNQLYNELNLGRREEYDVLDKRRGRDPEMGGKPRRKNPQEGLYNELQKDKMAEAYSEIGMKGERRRGKGHDGLYQGLSTATKDTYDALHMQALPPR

SEQ ID NO: 7002 - protein, 493 aa, Artificial Sequence
  source: /note="Description of Artificial Sequence: Synthetic Chimeric Antigen Receptor"
MALPVTALLLPLALLLHAARPDIVLTQSPASLAVSLGERATINCRASESVSVIGAHLIHWYQQKPGQPPKLLIYLASNLETGVPARFSGSGSGTDFTLTISSLQAEDAAIYYCLQSRIFPRTFGQGTKLEIKGSTSGSGKPGSGEGSTKGQIQLVQSGSELKKPGESVKISCKASGYTFTDYSINWVKQAPGQGLKWMGWINTETREPAYAYDFRGRFVFSLDTSASTAYLQISSLKAEDTAVYFCALDYSYAMDYWGQGTLVTVSSAAATTTPAPRPPTPAPTIASQPLSLRPEACRPAAGGAVHTRGLDFACDIYIWAPLAGTCGVLLLSLVITLYCKRGRKKLLYIFKQPFMRPVQTTQEEDGCSCRFPEEEEGGCELRVKFSRSADAPAYQQGQNQLYNELNLGRREEYDVLDKRRGRDPEMGGKPRRKNPQEGLYNELQKDKMAEAYSEIGMKGERRRGKGHDGLYQGLSTATKDTYDALHMQALPPR

SEQ ID NO: 7003 - protein, 493 aa, Artificial Sequence
  source: /note="Description of Artificial Sequence: Synthetic Chimeric Antigen Receptor"
MALPVTALLLPLALLLHAARPDIVLTQSPASLAVSLGERATINCRASESVSVIGAHLIHWYQQKPGQPPKLLIYLASNLETGVPARFSGSGSGTDFTLTISSLQAEDAAIYSCLQSRIFPRTFGQGTKLEIKGSTSGSGKPGSGEGSTKGQVQLVQSGSELKKPGASVKVSCKASGYTFTDYSINWVRQAPGQGLEWMGWINTETREPAYAYDFRGRFVFSLDTSVSTAYLQISSLKAEDTAVYYCARDYSYAMDYWGQGTLVTVSSAAATTTPAPRPPTPAPTIASQPLSLRPEACRPAAGGAVHTRGLDFACDIYIWAPLAGTCGVLLLSLVITLYCKRGRKKLLYIFKQPFMRPVQTTQEEDGCSCRFPEEEEGGCELRVKFSRSADAPAYQQGQNQLYNELNLGRREEYDVLDKRRGRDPEMGGKPRRKNPQEGLYNELQKDKMAEAYSEIGMKGERRRGKGHDGLYQGLSTATKDTYDALHMQALPPR

SEQ ID NO: 7004 - protein, 493 aa, Artificial Sequence
  source: /note="Description of Artificial Sequence: Synthetic Chimeric Antigen Receptor"
MALPVTALLLPLALLLHAARPDIVLTQSPASLAVSLGERATINCRASESVSVIGAHLIHWYQQKPGQPPKLLIYLASNLETGVPARFSGSGSGTDFTLTISSLQAEDAAIYSCLQSRIFPRTFGQGTKLEIKGSTSGSGKPGSGEGSTKGQVQLVQSGSELKKPGESVKVSCKASGYTFTDYSINWVRQAPGQGLEWMGWINTETREPAYAYDFRGRFVFSLDTSVSTAYLQISSLKAEDTAVYYCALDYSYAMDYWGQGTLVTVSSAAATTTPAPRPPTPAPTIASQPLSLRPEACRPAAGGAVHTRGLDFACDIYIWAPLAGTCGVLLLSLVITLYCKRGRKKLLYIFKQPFMRPVQTTQEEDGCSCRFPEEEEGGCELRVKFSRSADAPAYQQGQNQLYNELNLGRREEYDVLDKRRGRDPEMGGKPRRKNPQEGLYNELQKDKMAEAYSEIGMKGERRRGKGHDGLYQGLSTATKDTYDALHMQALPPR

SEQ ID NO: 7005 - protein, 493 aa, Artificial Sequence
  source: /note="Description of Artificial Sequence: Synthetic Chimeric Antigen Receptor"
MALPVTALLLPLALLLHAARPDIVLTQSPASLAVSLGERATINCRASESVSVIGAHLIHWYQQKPGQPPKLLIYLASNLETGVPARFSGSGSGTDFTLTISSLQAEDAAIYSCLQSRIFPRTFGQGTKLEIKGSTSGSGKPGSGEGSTKGQVQLVQSGSELKKPGESVKISCKASGYTFTDYSINWVRQAPGQGLEWMGWINTETREPAYAYDFRGRFVFSLDTSASTAYLQISSLKAEDTAVYFCALDYSYAMDYWGQGTLVTVSSAAATTTPAPRPPTPAPTIASQPLSLRPEACRPAAGGAVHTRGLDFACDIYIWAPLAGTCGVLLLSLVITLYCKRGRKKLLYIFKQPFMRPVQTTQEEDGCSCRFPEEEEGGCELRVKFSRSADAPAYQQGQNQLYNELNLGRREEYDVLDKRRGRDPEMGGKPRRKNPQEGLYNELQKDKMAEAYSEIGMKGERRRGKGHDGLYQGLSTATKDTYDALHMQALPPR

SEQ ID NO: 7006 - protein, 493 aa, Artificial Sequence
  source: /note="Description of Artificial Sequence: Synthetic Chimeric Antigen Receptor"
MALPVTALLLPLALLLHAARPDIVLTQSPASLAVSLGERATINCRASESVSVIGAHLIHWYQQKPGQPPKLLIYLASNLETGVPARFSGSGSGTDFTLTISSLQAEDAAIYSCLQSRIFPRTFGQGTKLEIKGSTSGSGKPGSGEGSTKGQVQLVQSGSELKKPGESVKISCKASGYTFTDYSINWVKQAPGQGLKWMGWINTETREPAYAYDFRGRFVFSLDTSASTAYLQISSLKAEDTAVYFCALDYSYAMDYWGQGTLVTVSSAAATTTPAPRPPTPAPTIASQPLSLRPEACRPAAGGAVHTRGLDFACDIYIWAPLAGTCGVLLLSLVITLYCKRGRKKLLYIFKQPFMRPVQTTQEEDGCSCRFPEEEEGGCELRVKFSRSADAPAYQQGQNQLYNELNLGRREEYDVLDKRRGRDPEMGGKPRRKNPQEGLYNELQKDKMAEAYSEIGMKGERRRGKGHDGLYQGLSTATKDTYDALHMQALPPR

SEQ ID NO: 7007 - protein, 493 aa, Artificial Sequence
  source: /note="Description of Artificial Sequence: Synthetic Chimeric Antigen Receptor"
MALPVTALLLPLALLLHAARPDIVLTQSPASLAVSLGERATINCRASESVSVIGAHLIHWYQQKPGQPPKLLIYLASNLETGVPARFSGSGSGTDFTLTISSLQAEDAAIYSCLQSRIFPRTFGQGTKLEIKGSTSGSGKPGSGEGSTKGQIQLVQSGSELKKPGESVKISCKASGYTFTDYSINWVKQAPGQGLKWMGWINTETREPAYAYDFRGRFVFSLDTSASTAYLQISSLKAEDTAVYFCALDYSYAMDYWGQGTLVTVSSAAATTTPAPRPPTPAPTIASQPLSLRPEACRPAAGGAVHTRGLDFACDIYIWAPLAGTCGVLLLSLVITLYCKRGRKKLLYIFKQPFMRPVQTTQEEDGCSCRFPEEEEGGCELRVKFSRSADAPAYQQGQNQLYNELNLGRREEYDVLDKRRGRDPEMGGKPRRKNPQEGLYNELQKDKMAEAYSEIGMKGERRRGKGHDGLYQGLSTATKDTYDALHMQALPPR

SEQ ID NO: 7008 - protein, 493 aa, Artificial Sequence
  source: /note="Description of Artificial Sequence: Synthetic Chimeric Antigen Receptor"
MALPVTALLLPLALLLHAARPDIVLTQSPASLAMSLGERATISCRASESVSVIGAHLIHWYQQKPGQPPKLLIYLASNLETGVPARFSGSGSGTDFTLTISRVQAEDAAIYSCLQSRIFPRTFGQGTKLEIKGSTSGSGKPGSGEGSTKGQVQLVQSGSELKKPGASVKVSCKASGYTFTDYSINWVRQAPGQGLEWMGWINTETREPAYAYDFRGRFVFSLDTSVSTAYLQISSLKAEDTAVYYCARDYSYAMDYWGQGTLVTVSSAAATTTPAPRPPTPAPTIASQPLSLRPEACRPAAGGAVHTRGLDFACDIYIWAPLAGTCGVLLLSLVITLYCKRGRKKLLYIFKQPFMRPVQTTQEEDGCSCRFPEEEEGGCELRVKFSRSADAPAYQQGQNQLYNELNLGRREEYDVLDKRRGRDPEMGGKPRRKNPQEGLYNELQKDKMAEAYSEIGMKGERRRGKGHDGLYQGLSTATKDTYDALHMQALPPR

SEQ ID NO: 7009 - protein, 493 aa, Artificial Sequence
  source: /note="Description of Artificial Sequence: Synthetic Chimeric Antigen Receptor"
MALPVTALLLPLALLLHAARPDIVLTQSPASLAMSLGERATISCRASESVSVIGAHLIHWYQQKPGQPPKLLIYLASNLETGVPARFSGSGSGTDFTLTISRVQAEDAAIYSCLQSRIFPRTFGQGTKLEIKGSTSGSGKPGSGEGSTKGQVQLVQSGSELKKPGESVKVSCKASGYTFTDYSINWVRQAPGQGLEWMGWINTETREPAYAYDFRGRFVFSLDTSVSTAYLQISSLKAEDTAVYYCALDYSYAMDYWGQGTLVTVSSAAATTTPAPRPPTPAPTIASQPLSLRPEACRPAAGGAVHTRGLDFACDIYIWAPLAGTCGVLLLSLVITLYCKRGRKKLLYIFKQPFMRPVQTTQEEDGCSCRFPEEEEGGCELRVKFSRSADAPAYQQGQNQLYNELNLGRREEYDVLDKRRGRDPEMGGKPRRKNPQEGLYNELQKDKMAEAYSEIGMKGERRRGKGHDGLYQGLSTATKDTYDALHMQALPPR

SEQ ID NO: 7010 - protein, 493 aa, Artificial Sequence
  source: /note="Description of Artificial Sequence: Synthetic Chimeric Antigen Receptor"
MALPVTALLLPLALLLHAARPDIVLTQSPASLAMSLGERATISCRASESVSVIGAHLIHWYQQKPGQPPKLLIYLASNLETGVPARFSGSGSGTDFTLTISRVQAEDAAIYSCLQSRIFPRTFGQGTKLEIKGSTSGSGKPGSGEGSTKGQVQLVQSGSELKKPGESVKISCKASGYTFTDYSINWVRQAPGQGLEWMGWINTETREPAYAYDFRGRFVFSLDTSASTAYLQISSLKAEDTAVYFCALDYSYAMDYWGQGTLVTVSSAAATTTPAPRPPTPAPTIASQPLSLRPEACRPAAGGAVHTRGLDFACDIYIWAPLAGTCGVLLLSLVITLYCKRGRKKLLYIFKQPFMRPVQTTQEEDGCSCRFPEEEEGGCELRVKFSRSADAPAYQQGQNQLYNELNLGRREEYDVLDKRRGRDPEMGGKPRRKNPQEGLYNELQKDKMAEAYSEIGMKGERRRGKGHDGLYQGLSTATKDTYDALHMQALPPR

SEQ ID NO: 7011 - protein, 493 aa, Artificial Sequence
  source: /note="Description of Artificial Sequence: Synthetic Chimeric Antigen Receptor"
MALPVTALLLPLALLLHAARPDIVLTQSPASLAMSLGERATISCRASESVSVIGAHLIHWYQQKPGQPPKLLIYLASNLETGVPARFSGSGSGTDFTLTISRVQAEDAAIYSCLQSRIFPRTFGQGTKLEIKGSTSGSGKPGSGEGSTKGQVQLVQSGSELKKPGESVKISCKASGYTFTDYSINWVKQAPGQGLKWMGWINTETREPAYAYDFRGRFVFSLDTSASTAYLQISSLKAEDTAVYFCALDYSYAMDYWGQGTLVTVSSAAATTTPAPRPPTPAPTIASQPLSLRPEACRPAAGGAVHTRGLDFACDIYIWAPLAGTCGVLLLSLVITLYCKRGRKKLLYIFKQPFMRPVQTTQEEDGCSCRFPEEEEGGCELRVKFSRSADAPAYQQGQNQLYNELNLGRREEYDVLDKRRGRDPEMGGKPRRKNPQEGLYNELQKDKMAEAYSEIGMKGERRRGKGHDGLYQGLSTATKDTYDALHMQALPPR

SEQ ID NO: 7012 - protein, 493 aa, Artificial Sequence
  source: /note="Description of Artificial Sequence: Synthetic Chimeric Antigen Receptor"
MALPVTALLLPLALLLHAARPDIVLTQSPASLAMSLGERATISCRASESVSVIGAHLIHWYQQKPGQPPKLLIYLASNLETGVPARFSGSGSGTDFTLTISRVQAEDAAIYSCLQSRIFPRTFGQGTKLEIKGSTSGSGKPGSGEGSTKGQIQLVQSGSELKKPGESVKISCKASGYTFTDYSINWVKQAPGQGLKWMGWINTETREPAYAYDFRGRFVFSLDTSASTAYLQISSLKAEDTAVYFCALDYSYAMDYWGQGTLVTVSSAAATTTPAPRPPTPAPTIASQPLSLRPEACRPAAGGAVHTRGLDFACDIYIWAPLAGTCGVLLLSLVITLYCKRGRKKLLYIFKQPFMRPVQTTQEEDGCSCRFPEEEEGGCELRVKFSRSADAPAYQQGQNQLYNELNLGRREEYDVLDKRRGRDPEMGGKPRRKNPQEGLYNELQKDKMAEAYSEIGMKGERRRGKGHDGLYQGLSTATKDTYDALHMQALPPR

SEQ ID NO: 7013 - protein, 487 aa, Artificial Sequence
  source: /note="Description of Artificial Sequence: Synthetic Chimeric Antigen Receptor"
MALPVTALLLPLALLLHAARPDIVLTQSPASLAVSLGERATINCRASESVSVIGAHLIHWYQQKPGQPPKLLIYLASNLETGVPARFSGSGSGTDFTLTISSLQAEDAAIYYCLQSRIFPRTFGQGTKLEIKGSTSGSGKPGSGEGSTKGQVQLVQSGSELKKPGASVKVSCKASGYTFTDYSINWVRQAPGQGLEWMGWINTETREPAYAYDFRGRFVFSLDTSVSTAYLQISSLKAEDTAVYYCARDYSYAMDYWGQGTLVTVSSAAADTGLYICKVELMYPPPYYLGIGNGTQIYVIDPEPCPDSDFLLWILAAVSSGLFFYSFLLTAVSKRGRKKLLYIFKQPFMRPVQTTQEEDGCSCRFPEEEEGGCELRVKFSRSADAPAYQQGQNQLYNELNLGRREEYDVLDKRRGRDPEMGGKPRRKNPQEGLYNELQKDKMAEAYSEIGMKGERRRGKGHDGLYQGLSTATKDTYDALHMQALPPR

SEQ ID NO: 7014 - protein, 485 aa, Artificial Sequence
  source: /note="Description of Artificial Sequence: Synthetic Chimeric Antigen Receptor"
MALPVTALLLPLALLLHAARPDIVLTQSPASLAVSLGERATINCRASESVSVIGAHLIHWYQQKPGQPPKLLIYLASNLETGVPARFSGSGSGTDFTLTISSLQAEDAAIYYCLQSRIFPRTFGQGTKLEIKGSTSGSGKPGSGEGSTKGQVQLVQSGSELKKPGASVKVSCKASGYTFTDYSINWVRQAPGQGLEWMGWINTETREPAYAYDFRGRFVFSLDTSVSTAYLQISSLKAEDTAVYYCARDYSYAMDYWGQGTLVTVSSAAAQIKESLRAELRVTERRAEVPTAHPSPSPRPAGQFQTLVVGVVGGLLGSLVLLVWVLAVICSKRGRKKLLYIFKQPFMRPVQTTQEEDGCSCRFPEEEEGGCELRVKFSRSADAPAYQQGQNQLYNELNLGRREEYDVLDKRRGRDPEMGGKPRRKNPQEGLYNELQKDKMAEAYSEIGMKGERRRGKGHDGLYQGLSTATKDTYDALHMQALPPR

SEQ ID NO: 7015 - protein, 464 aa, Artificial Sequence
  source: /note="Description of Artificial Sequence: Synthetic Chimeric Antigen Receptor"
EVQLLESGGGLVQPGGSLRLSCAASGFTFSSYAMNWVRQAPGKGLEWVSAILSSGGSTYYADSVKGRFTISRDNSKNTLYLQMNSLRAEDTAVYYCARYWPMDIWGQGTLVTVSSGGGGSGGGGSGGGGSEIVLTQSPGTLSLSPGERATLSCRGGQSVSSSYLAWYQQKPGQAPRLLMYDASIRATGIPDRFSGSGSGTDFTLTISRLEPEDFAVYYCQQYQSWPLTFGQGTKVEIKAPTTTPAPRPPTPAPTIASQPLSLRPEACRPAAGGAVHTRGLDFACDIYIWAPLAGTCGVLLLSLVITLYCRRGRKKLLYIFKQPFMRPVQTTQEEDGCSCRFPEEEEGGCELRVKFSRSADAPAYQQGQNQLYNELNLGRREEYDVLDKRRGRDPEMGGKPRRKNPQEGLYNELQKDKMAEAYSEIGMKGERRRGKGHDGLYQGLSTATKDTYDALHMQALPPRE

SEQ ID NO: 7016 - protein, 498 aa, Artificial Sequence
  source: /note="Description of Artificial Sequence: Synthetic Chimeric Antigen Receptor"
EVQLLESGGGLVQPGGSLRLSCAASGFTFSSYAMNWVRQAPGKGLEWVSAILSSGGSTYYADSVKGRFTISRDNSKNTLYLQMNSLRAEDTAVYYCARYWPMDIWGQGTLVTVSSGGGGSGGGGSGGGGSEIVLTQSPGTLSLSPGERATLSCRGGQSVSSSYLAWYQQKPGQAPRLLMYDASIRATGIPDRFSGSGSGTDFTLTISRLEPEDFAVYYCQQYQSWPLTFGQGTKVEIKSDPGSGGGGSCPYSNPSLCSGGGGSCPYSNPSLCAPTTTPAPRPPTPAPTIASQPLSLRPEACRPAAGGAVHTRGLDFACDIYIWAPLAGTCGVLLLSLVITLYCRRGRKKLLYIFKQPFMRPVQTTQEEDGCSCRFPEEEEGGCELRVKFSRSADAPAYQQGQNQLYNELNLGRREEYDVLDKRRGRDPEMGGKPRRKNPQEGLYNELQKDKMAEAYSEIGMKGERRRGKGHDGLYQGLSTATKDTYDALHMQALPPRE

SEQ ID NO: 7017 - protein, 513 aa, Artificial Sequence
  source: /note="Description of Artificial Sequence: Synthetic Chimeric Antigen Receptor"
EVQLLESGGGLVQPGGSLRLSCAASGFTFSSYAMNWVRQAPGKGLEWVSAILSSGGSTYYADSVKGRFTISRDNSKNTLYLQMNSLRAEDTAVYYCARYWPMDIWGQGTLVTVSSGGGGSGGGGSGGGGSEIVLTQSPGTLSLSPGERATLSCRGGQSVSSSYLAWYQQKPGQAPRLLMYDASIRATGIPDRFSGSGSGTDFTLTISRLEPEDFAVYYCQQYQSWPLTFGQGTKVEIKSDPGSGGGGSCPYSNPSLCSGGGGSCPYSNPSLCSGGGGSCPYSNPSLCAPTTTPAPRPPTPAPTIASQPLSLRPEACRPAAGGAVHTRGLDFACDIYIWAPLAGTCGVLLLSLVITLYCRRGRKKLLYIFKQPFMRPVQTTQEEDGCSCRFPEEEEGGCELRVKFSRSADAPAYQQGQNQLYNELNLGRREEYDVLDKRRGRDPEMGGKPRRKNPQEGLYNELQKDKMAEAYSEIGMKGERRRGKGHDGLYQGLSTATKDTYDALHMQALPPRE

SEQ ID NO: 7018 - protein, 522 aa, Artificial Sequence
  source: /note="Description of Artificial Sequence: Synthetic Chimeric Antigen Receptor"
EVQLLESGGGLVQPGGSLRLSCAASGFTFSSYAMNWVRQAPGKGLEWVSAILSSGGSTYYADSVKGRFTISRDNSKNTLYLQMNSLRAEDTAVYYCARYWPMDIWGQGTLVTVSSGGGGSGGGGSGGGGSEIVLTQSPGTLSLSPGERATLSCRGGQSVSSSYLAWYQQKPGQAPRLLMYDASIRATGIPDRFSGSGSGTDFTLTISRLEPEDFAVYYCQQYQSWPLTFGQGTKVEIKSDPGSGGGGSCPYSNPSLCSGGGGSELPTQGTFSNVSTNVSPAKPTTTACPYSNPSLCAPTTTPAPRPPTPAPTIASQPLSLRPEACRPAAGGAVHTRGLDFACDIYIWAPLAGTCGVLLLSLVITLYCRRGRKKLLYIFKQPFMRPVQTTQEEDGCSCRFPEEEEGGCELRVKFSRSADAPAYQQGQNQLYNELNLGRREEYDVLDKRRGRDPEMGGKPRRKNPQEGLYNELQKDKMAEAYSEIGMKGERRRGKGHDGLYQGLSTATKDTYDALHMQALPPRE

SEQ ID NO: 7019 - protein, 500 aa, Artificial Sequence
  source: /note="Description of Artificial Sequence: Synthetic Chimeric Antigen Receptor"
GGGGSCPYSNPSLCSGGGGSCPYSNPSLCSGGGGSEVQLLESGGGLVQPGGSLRLSCAASGFTFSSYAMNWVRQAPGKGLEWVSAILSSGGSTYYADSVKGRFTISRDNSKNTLYLQMNSLRAEDTAVYYCARYWPMDIWGQGTLVTVSSGGGGSGGGGSGGGGSEIVLTQSPGTLSLSPGERATLSCRGGQSVSSSYLAWYQQKPGQAPRLLMYDASIRATGIPDRFSGSGSGTDFTLTISRLEPEDFAVYYCQQYQSWPLTFGQGTKVEIKSDPTTTPAPRPPTPAPTIASQPLSLRPEACRPAAGGAVHTRGLDFACDIYIWAPLAGTCGVLLLSLVITLYCRRGRKKLLYIFKQPFMRPVQTTQEEDGCSCRFPEEEEGGCELRVKFSRSADAPAYQQGQNQLYNELNLGRREEYDVLDKRRGRDPEMGGKPRRKNPQEGLYNELQKDKMAEAYSEIGMKGERRRGKGHDGLYQGLSTATKDTYDALHMQALPPRE

SEQ ID NO: 7020 - protein, 466 aa, Artificial Sequence
  source: /note="Description of Artificial Sequence: Synthetic Chimeric Antigen Receptor"
EVQLLESGGGLVQPGGSLRLSCAASGFTFSSYAMNWVRQAPGKGLEWVSAILSSGGSTYYADSVKGRFTISRDNSKNTLYLQMNSLRAEDTAVYYCARYWPMDIWGQGTLVTVSSGGSCPYSNPSLCSGGSEIVLTQSPGTLSLSPGERATLSCRGGQSVSSSYLAWYQQKPGQAPRLLMYDASIRATGIPDRFSGSGSGTDFTLTISRLEPEDFAVYYCQQYQSWPLTFGQGTKVEIKSDPTTTPAPRPPTPAPTIASQPLSLRPEACRPAAGGAVHTRGLDFACDIYIWAPLAGTCGVLLLSLVITLYCRRGRKKLLYIFKQPFMRPVQTTQEEDGCSCRFPEEEEGGCELRVKFSRSADAPAYQQGQNQLYNELNLGRREEYDVLDKRRGRDPEMGGKPRRKNPQEGLYNELQKDKMAEAYSEIGMKGERRRGKGHDGLYQGLSTATKDTYDALHMQALPPRE

SEQ ID NO: 7021 - protein, 472 aa, Artificial Sequence
  source: /note="Description of Artificial Sequence: Synthetic Chimeric Antigen Receptor"
EVQLLESGGGLVQPGGSLRLSCAASGFTFSSYAMNWVRQAPGKGLEWVSAILSSGGSTYYADSVKGRFTISRDNSKNTLYLQMNSLRAEDTAVYYCARYWPMDIWGQGTLVTVSSGGGGGSCPYSNPSLCSGGGGGSEIVLTQSPGTLSLSPGERATLSCRGGQSVSSSYLAWYQQKPGQAPRLLMYDASIRATGIPDRFSGSGSGTDFTLTISRLEPEDFAVYYCQQYQSWPLTFGQGTKVEIKSDPTTTPAPRPPTPAPTIASQPLSLRPEACRPAAGGAVHTRGLDFACDIYIWAPLAGTCGVLLLSLVITLYCRRGRKKLLYIFKQPFMRPVQTTQEEDGCSCRFPEEEEGGCELRVKFSRSADAPAYQQGQNQLYNELNLGRREEYDVLDKRRGRDPEMGGKPRRKNPQEGLYNELQKDKMAEAYSEIGMKGERRRGKGHDGLYQGLSTATKDTYDALHMQALPPRE

SEQ ID NO: 7022 - protein, 491 aa, Artificial Sequence
  source: /note="Description of Artificial Sequence: Synthetic Chimeric Antigen Receptor"
GGGGSCPYSNPSLCSGGGGSGGGGSEVQLLESGGGLVQPGGSLRLSCAASGFTFSSYAMNWVRQAPGKGLEWVSAILSSGGSTYYADSVKGRFTISRDNSKNTLYLQMNSLRAEDTAVYYCARYWPMDIWGQGTLVTVSSGGSCPYSNPSLCSGGSEIVLTQSPGTLSLSPGERATLSCRGGQSVSSSYLAWYQQKPGQAPRLLMYDASIRATGIPDRFSGSGSGTDFTLTISRLEPEDFAVYYCQQYQSWPLTFGQGTKVEIKSDPTTTPAPRPPTPAPTIASQPLSLRPEACRPAAGGAVHTRGLDFACDIYIWAPLAGTCGVLLLSLVITLYCRRGRKKLLYIFKQPFMRPVQTTQEEDGCSCRFPEEEEGGCELRVKFSRSADAPAYQQGQNQLYNELNLGRREEYDVLDKRRGRDPEMGGKPRRKNPQEGLYNELQKDKMAEAYSEIGMKGERRRGKGHDGLYQGLSTATKDTYDALHMQALPPRE

SEQ ID NO: 7023 - protein, 497 aa, Artificial Sequence
  source: /note="Description of Artificial Sequence: Synthetic Chimeric Antigen Receptor"
GGGGSCPYSNPSLCSGGGGSGGGGSEVQLLESGGGLVQPGGSLRLSCAASGFTFSSYAMNWVRQAPGKGLEWVSAILSSGGSTYYADSVKGRFTISRDNSKNTLYLQMNSLRAEDTAVYYCARYWPMDIWGQGTLVTVSSGGGGGSCPYSNPSLCSGGGGGSEIVLTQSPGTLSLSPGERATLSCRGGQSVSSSYLAWYQQKPGQAPRLLMYDASIRATGIPDRFSGSGSGTDFTLTISRLEPEDFAVYYCQQYQSWPLTFGQGTKVEIKSDPTTTPAPRPPTPAPTIASQPLSLRPEACRPAAGGAVHTRGLDFACDIYIWAPLAGTCGVLLLSLVITLYCRRGRKKLLYIFKQPFMRPVQTTQEEDGCSCRFPEEEEGGCELRVKFSRSADAPAYQQGQNQLYNELNLGRREEYDVLDKRRGRDPEMGGKPRRKNPQEGLYNELQKDKMAEAYSEIGMKGERRRGKGHDGLYQGLSTATKDTYDALHMQALPPRE

SEQ ID NO: 7024 - protein, 490 aa, Artificial Sequence
  source: /note="Description of Artificial Sequence: Synthetic Chimeric Antigen Receptor"
EVQLLESGGGLVQPGGSLRLSCAASGFTFSSYAMNWVRQAPGKGLEWVSAILSSGGSTYYADSVKGRFTISRDNSKNTLYLQMNSLRAEDTAVYYCARYWPMDIWGQGTLVTVSSGGSCPYSNPSLCSGGSEIVLTQSPGTLSLSPGERATLSCRGGQSVSSSYLAWYQQKPGQAPRLLMYDASIRATGIPDRFSGSGSGTDFTLTISRLEPEDFAVYYCQQYQSWPLTFGQGTKVEIKSDPGSGGGGSCPYSNPSLCSGGGGSAPTTTPAPRPPTPAPTIASQPLSLRPEACRPAAGGAVHTRGLDFACDIYIWAPLAGTCGVLLLSLVITLYCRRGRKKLLYIFKQPFMRPVQTTQEEDGCSCRFPEEEEGGCELRVKFSRSADAPAYQQGQNQLYNELNLGRREEYDVLDKRRGRDPEMGGKPRRKNPQEGLYNELQKDKMAEAYSEIGMKGERRRGKGHDGLYQGLSTATKDTYDALHMQALPPRE

SEQ ID NO: 7025 - protein, 496 aa, Artificial Sequence
  source: /note="Description of Artificial Sequence: Synthetic Chimeric Antigen Receptor"
EVQLLESGGGLVQPGGSLRLSCAASGFTFSSYAMNWVRQAPGKGLEWVSAILSSGGSTYYADSVKGRFTISRDNSKNTLYLQMNSLRAEDTAVYYCARYWPMDIWGQGTLVTVSSGGGGGSCPYSNPSLCSGGGGGSEIVLTQSPGTLSLSPGERATLSCRGGQSVSSSYLAWYQQKPGQAPRLLMYDASIRATGIPDRFSGSGSGTDFTLTISRLEPEDFAVYYCQQYQSWPLTFGQGTKVEIKSDPGSGGGGSCPYSNPSLCSGGGGSAPTTTPAPRPPTPAPTIASQPLSLRPEACRPAAGGAVHTRGLDFACDIYIWAPLAGTCGVLLLSLVITLYCRRGRKKLLYIFKQPFMRPVQTTQEEDGCSCRFPEEEEGGCELRVKFSRSADAPAYQQGQNQLYNELNLGRREEYDVLDKRRGRDPEMGGKPRRKNPQEGLYNELQKDKMAEAYSEIGMKGERRRGKGHDGLYQGLSTATKDTYDALHMQALPPRE

SEQ ID NO: 7026 - protein, 514 aa, Artificial Sequence
  source: /note="Description of Artificial Sequence: Synthetic Chimeric Antigen Receptor"
GGGGSCPYSNPSLCSGGGGSGGGGSEVQLLESGGGLVQPGGSLRLSCAASGFTFSSYAMNWVRQAPGKGLEWVSAILSSGGSTYYADSVKGRFTISRDNSKNTLYLQMNSLRAEDTAVYYCARYWPMDIWGQGTLVTVSSGGGGSGGGGSGGGGSEIVLTQSPGTLSLSPGERATLSCRGGQSVSSSYLAWYQQKPGQAPRLLMYDASIRATGIPDRFSGSGSGTDFTLTISRLEPEDFAVYYCQQYQSWPLTFGQGTKVEIKSDPGSGGGGSCPYSNPSLCSGGGGSAPTTTPAPRPPTPAPTIASQPLSLRPEACRPAAGGAVHTRGLDFACDIYIWAPLAGTCGVLLLSLVITLYCRRGRKKLLYIFKQPFMRPVQTTQEEDGCSCRFPEEEEGGCELRVKFSRSADAPAYQQGQNQLYNELNLGRREEYDVLDKRRGRDPEMGGKPRRKNPQEGLYNELQKDKMAEAYSEIGMKGERRRGKGHDGLYQGLSTATKDTYDALHMQALPPRE

SEQ ID NO: 7027 - protein, 515 aa, Artificial Sequence
  source: /note="Description of Artificial Sequence: Synthetic Chimeric Antigen Receptor"
GGGGSCPYSNPSLCSGGGGSGGGGSEVQLLESGGGLVQPGGSLRLSCAASGFTFSSYAMNWVRQAPGKGLEWVSAILSSGGSTYYADSVKGRFTISRDNSKNTLYLQMNSLRAEDTAVYYCARYWPMDIWGQGTLVTVSSGGSCPYSNPSLCSGGSEIVLTQSPGTLSLSPGERATLSCRGGQSVSSSYLAWYQQKPGQAPRLLMYDASIRATGIPDRFSGSGSGTDFTLTISRLEPEDFAVYYCQQYQSWPLTFGQGTKVEIKSDPGSGGGGSCPYSNPSLCSGGGGSAPTTTPAPRPPTPAPTIASQPLSLRPEACRPAAGGAVHTRGLDFACDIYIWAPLAGTCGVLLLSLVITLYCRRGRKKLLYIFKQPFMRPVQTTQEEDGCSCRFPEEEEGGCELRVKFSRSADAPAYQQGQNQLYNELNLGRREEYDVLDKRRGRDPEMGGKPRRKNPQEGLYNELQKDKMAEAYSEIGMKGERRRGKGHDGLYQGLSTATKDTYDALHMQALPPRE

SEQ ID NO: 7028 - protein, 521 aa, Artificial Sequence
  source: /note="Description of Artificial Sequence: Synthetic Chimeric Antigen Receptor"
GGGGSCPYSNPSLCSGGGGSGGGGSEVQLLESGGGLVQPGGSLRLSCAASGFTFSSYAMNWVRQAPGKGLEWVSAILSSGGSTYYADSVKGRFTISRDNSKNTLYLQMNSLRAEDTAVYYCARYWPMDIWGQGTLVTVSSGGGGGSCPYSNPSLCSGGGGGSEIVLTQSPGTLSLSPGERATLSCRGGQSVSSSYLAWYQQKPGQAPRLLMYDASIRATGIPDRFSGSGSGTDFTLTISRLEPEDFAVYYCQQYQSWPLTFGQGTKVEIKSDPGSGGGGSCPYSNPSLCSGGGGSAPTTTPAPRPPTPAPTIASQPLSLRPEACRPAAGGAVHTRGLDFACDIYIWAPLAGTCGVLLLSLVITLYCRRGRKKLLYIFKQPFMRPVQTTQEEDGCSCRFPEEEEGGCELRVKFSRSADAPAYQQGQNQLYNELNLGRREEYDVLDKRRGRDPEMGGKPRRKNPQEGLYNELQKDKMAEAYSEIGMKGERRRGKGHDGLYQGLSTATKDTYDALHMQALPPRE

SEQ ID NO: 7029 - protein, 504 aa, Artificial Sequence
  source: /note="Description of Artificial Sequence: Synthetic Chimeric Antigen Receptor"
EVQLLESGGGLVQPGGSLRLSCAASGFTFSSYAMNWVRQAPGKGLEWVSAILSSGGSTYYADSVKGRFTISRDNSKNTLYLQMNSLRAEDTAVYYCARYWPMDIWGQGTLVTVSSGGGGSGGGGSGGGGSEIVLTQSPGTLSLSPGERATLSCRGGQSVSSSYLAWYQQKPGQAPRLLMYDASIRATGIPDRFSGSGSGTDFTLTISRLEPEDFAVYYCQQYQSWPLTFGQGTKVEIKSDPGSGGGGSCPYSNPSLCSGGGGSCPYSNPSLCSGGGGSAPTTTPAPRPPTPAPTIASQPLSLRPEACRPAAGGAVHTRGLDFACDIYIWAPLAGTCGVLLLSLVITLYCRRGRKKLLYIFKQPFMRPVQTTQEEDGCSCRFPEEEEGGCELRVKFSRSADAPAYQQGQNQLYNELNLGRREEYDVLDKRRGRDPEMGGKPRRKNPQEGLYNELQKDKMAEAYSEIGMKGERRRGKGHDGLYQGLSTATKDTYDALHMQALPPRE

SEQ ID NO: 7030 - protein, 547 aa, Artificial Sequence
  source: /note="Description of Artificial Sequence: Synthetic Chimeric Antigen Receptor"
GGGGSCPYSNPSLCSGGGGSGGGGSEVQLLESGGGLVQPGGSLRLSCAASGFTFSSYAMNWVRQAPGKGLEWVSAILSSGGSTYYADSVKGRFTISRDNSKNTLYLQMNSLRAEDTAVYYCARYWPMDIWGQGTLVTVSSGGGGSGGGGSGGGGSEIVLTQSPGTLSLSPGERATLSCRGGQSVSSSYLAWYQQKPGQAPRLLMYDASIRATGIPDRFSGSGSGTDFTLTISRLEPEDFAVYYCQQYQSWPLTFGQGTKVEIKSDPGSGGGGSCPYSNPSLCSGGGGSELPTQGTFSNVSTNVSPAKPTTTACPYSNPSLCAPTTTPAPRPPTPAPTIASQPLSLRPEACRPAAGGAVHTRGLDFACDIYIWAPLAGTCGVLLLSLVITLYCRRGRKKLLYIFKQPFMRPVQTTQEEDGCSCRFPEEEEGGCELRVKFSRSADAPAYQQGQNQLYNELNLGRREEYDVLDKRRGRDPEMGGKPRRKNPQEGLYNELQKDKMAEAYSEIGMKGERRRGKGHDGLYQGLSTATKDTYDALHMQALPPRE

SEQ ID NO: 7031 - protein, 523 aa, Artificial Sequence
  source: /note="Description of Artificial Sequence: Synthetic Chimeric Antigen Receptor"
EVQLLESGGGLVQPGGSLRLSCAASGFTFSSYAMNWVRQAPGKGLEWVSAILSSGGSTYYADSVKGRFTISRDNSKNTLYLQMNSLRAEDTAVYYCARYWPMDIWGQGTLVTVSSGGSCPYSNPSLCSGGSEIVLTQSPGTLSLSPGERATLSCRGGQSVSSSYLAWYQQKPGQAPRLLMYDASIRATGIPDRFSGSGSGTDFTLTISRLEPEDFAVYYCQQYQSWPLTFGQGTKVEIKSDPGSGGGGSCPYSNPSLCSGGGGSELPTQGTFSNVSTNVSPAKPTTTACPYSNPSLCAPTTTPAPRPPTPAPTIASQPLSLRPEACRPAAGGAVHTRGLDFACDIYIWAPLAGTCGVLLLSLVITLYCRRGRKKLLYIFKQPFMRPVQTTQEEDGCSCRFPEEEEGGCELRVKFSRSADAPAYQQGQNQLYNELNLGRREEYDVLDKRRGRDPEMGGKPRRKNPQEGLYNELQKDKMAEAYSEIGMKGERRRGKGHDGLYQGLSTATKDTYDALHMQALPPRE

SEQ ID NO: 7032 - protein, 469 aa, Artificial Sequence
  source: /note="Description of Artificial Sequence: Synthetic Chimeric Antigen Receptor"
QVQLVQSGAEVKKPGASVKVSCKASGYSFPDYYINWVRQAPGQGLEWMGWIYFASGNSEYNQKFTGRVTMTRDTSSSTAYMELSSLRSEDTAVYFCASLYDYDWYFDVWGQGTMVTVSSGGGGSGGGGSGGGGSDIVMTQTPLSLSVTPGEPASISCKSSQSLVHSNGNTYLHWYLQKPGQSPQLLIYKVSNRFSGVPDRFSGSGSGADFTLKISRVEAEDVGVYYCAETSHVPWTFGQGTKLEIKTTTPAPRPPTPAPTIASQPLSLRPEACRPAAGGAVHTRGLDFACDIYIWAPLAGTCGVLLLSLVITLYCKRGRKKLLYIFKQPFMRPVQTTQEEDGCSCRFPEEEEGGCELRVKFSRSADAPAYQQGQNQLYNELNLGRREEYDVLDKRRGRDPEMGGKPRRKNPQEGLYNELQKDKMAEAYSEIGMKGERRRGKGHDGLYQGLSTATKDTYDALHMQALPPR

SEQ ID NO: 7033 - protein, 485 aa, Artificial Sequence
  source: /note="Description of Artificial Sequence: Synthetic Chimeric Antigen Receptor"
QVQLVQSGAEVKKPGASVKVSCKASGYSFPDYYINWVRQAPGQGLEWMGWIYFASGNSEYNQKFTGRVTMTRDTSSSTAYMELSSLRSEDTAVYFCASLYDYDWYFDVWGQGTMVTVSSGGGGSGGGGSGGGGSDIVMTQTPLSLSVTPGEPASISCKSSQSLVHSNGNTYLHWYLQKPGQSPQLLIYKVSNRFSGVPDRFSGSGSGADFTLKISRVEAEDVGVYYCAETSHVPWTFGQGTKLEIKGSGGGGSCPYSNPSLCTTTPAPRPPTPAPTIASQPLSLRPEACRPAAGGAVHTRGLDFACDIYIWAPLAGTCGVLLLSLVITLYCKRGRKKLLYIFKQPFMRPVQTTQEEDGCSCRFPEEEEGGCELRVKFSRSADAPAYQQGQNQLYNELNLGRREEYDVLDKRRGRDPEMGGKPRRKNPQEGLYNELQKDKMAEAYSEIGMKGERRRGKGHDGLYQGLSTATKDTYDALHMQALPPR

SEQ ID NO: 7034 - protein, 491 aa, Artificial Sequence
  source: /note="Description of Artificial Sequence: Synthetic Chimeric Antigen Receptor"
QVQLVQSGAEVKKPGASVKVSCKASGYSFPDYYINWVRQAPGQGLEWMGWIYFASGNSEYNQKFTGRVTMTRDTSSSTAYMELSSLRSEDTAVYFCASLYDYDWYFDVWGQGTMVTVSSGGGGSGGGGSGGGGSDIVMTQTPLSLSVTPGEPASISCKSSQSLVHSNGNTYLHWYLQKPGQSPQLLIYKVSNRFSGVPDRFSGSGSGADFTLKISRVEAEDVGVYYCAETSHVPWTFGQGTKLEIKGSGGGGSCPYSNPSLCSGGGGSTTTPAPRPPTPAPTIASQPLSLRPEACRPAAGGAVHTRGLDFACDIYIWAPLAGTCGVLLLSLVITLYCKRGRKKLLYIFKQPFMRPVQTTQEEDGCSCRFPEEEEGGCELRVKFSRSADAPAYQQGQNQLYNELNLGRREEYDVLDKRRGRDPEMGGKPRRKNPQEGLYNELQKDKMAEAYSEIGMKGERRRGKGHDGLYQGLSTATKDTYDALHMQALPPR

SEQ ID NO: 7035 - protein, 500 aa, Artificial Sequence
  source: /note="Description of Artificial Sequence: Synthetic Chimeric Antigen Receptor"
QVQLVQSGAEVKKPGASVKVSCKASGYSFPDYYINWVRQAPGQGLEWMGWIYFASGNSEYNQKFTGRVTMTRDTSSSTAYMELSSLRSEDTAVYFCASLYDYDWYFDVWGQGTMVTVSSGGGGSGGGGSGGGGSDIVMTQTPLSLSVTPGEPASISCKSSQSLVHSNGNTYLHWYLQKPGQSPQLLIYKVSNRFSGVPDRFSGSGSGADFTLKISRVEAEDVGVYYCAETSHVPWTFGQGTKLEIKGSGGGGSCPYSNPSLCSGGGGSCPYSNPSLCTTTPAPRPPTPAPTIASQPLSLRPEACRPAAGGAVHTRGLDFACDIYIWAPLAGTCGVLLLSLVITLYCKRGRKKLLYIFKQPFMRPVQTTQEEDGCSCRFPEEEEGGCELRVKFSRSADAPAYQQGQNQLYNELNLGRREEYDVLDKRRGRDPEMGGKPRRKNPQEGLYNELQKDKMAEAYSEIGMKGERRRGKGHDGLYQGLSTATKDTYDALHMQALPPR

SEQ ID NO: 7036 - protein, 506 aa, Artificial Sequence
  source: /note="Description of Artificial Sequence: Synthetic Chimeric Antigen Receptor"
QVQLVQSGAEVKKPGASVKVSCKASGYSFPDYYINWVRQAPGQGLEWMGWIYFASGNSEYNQKFTGRVTMTRDTSSSTAYMELSSLRSEDTAVYFCASLYDYDWYFDVWGQGTMVTVSSGGGGSGGGGSGGGGSDIVMTQTPLSLSVTPGEPASISCKSSQSLVHSNGNTYLHWYLQKPGQSPQLLIYKVSNRFSGVPDRFSGSGSGADFTLKISRVEAEDVGVYYCAETSHVPWTFGQGTKLEIKGSGGGGSCPYSNPSLCSGGGGSCPYSNPSLCSGGGGSTTTPAPRPPTPAPTIASQPLSLRPEACRPAAGGAVHTRGLDFACDIYIWAPLAGTCGVLLLSLVITLYCKRGRKKLLYIFKQPFMRPVQTTQEEDGCSCRFPEEEEGGCELRVKFSRSADAPAYQQGQNQLYNELNLGRREEYDVLDKRRGRDPEMGGKPRRKNPQEGLYNELQKDKMAEAYSEIGMKGERRRGKGHDGLYQGLSTATKDTYDALHMQALPPR

SEQ ID NO: 7037 - protein, 136 aa, Artificial Sequence
  source: /note="Description of Artificial Sequence: Synthetic Chimeric Antigen Receptor"
CPYSNPSLCSGGGGSELPTQGTFSNVSTNVSPAKPTTTACPYSNPSLCSGGGGSPAPRPPTPAPTIASQPLSLRPEACRPAAGGAVHTRGLDFACDIYIWAPLAGTCGVLLLSLVITLYCNHRNRRRVCKCPRPVV

SEQ ID NO: 7038 - protein, 449 aa, Artificial Sequence
  source: /note="Description of Artificial Sequence: Synthetic Chimeric Antigen Receptor"
EVKLVESGGGLVQPGGSLSLSCAASGFTFTDYYMSWVRQPPGKALEWLALIRSKADGYTTEYSASVKGRFTLSRDDSQSILYLQMNALRPEDSATYYCARDAAYYSYYSPEGAMDYWGQGTSVTVSSGGGGSGGGGSGGGGSMADYKDIVMTQSHKFMSTSVGDRVNITCKASQNVDSAVAWYQQKPGQSPKALIYSASYRYSGVPDRFTGRGSGTDFTLTISSVQAEDLAVYYCQQYYSTPWTFGGGTKLEIKRGLAVSTISSFFPPGYQIYIWAPLAGTCGVLLLSLVITLYCKRGRKKLLYIFKQPFMRPVQTTQEEDGCSCRFPEEEEGGCELRVKFSRSADAPAYQQGQNQLYNELNLGRREEYDVLDKRRGRDPEMGGKPRRKNPQEGLYNELQKDKMAEAYSEIGMKGERRRGKGHDGLYQGLSTATKDTYDALHMQALPPR

SEQ ID NO: 7039 - protein, 430 aa, Artificial Sequence
  source: /note="Description of Artificial Sequence: Synthetic Chimeric Antigen Receptor"
MALPVTALLLPLALLLHAARPGSGSGAQAAQVQLVQSGAEVKKPGASVKVSCKASGYSFPDYYINWVRQAPGQGLEWMGWIYFASGNSEYNQKFTGRVTMTRDTSSSTAYMELSSLRSEDTAVYFCASLYDYDWYFDVWGQGTMVTVSSGGGGSGGGGSGGGGSDIVMTQTPLSLSVTPGEPASISCKSSQSLVHSNGNTYLHWYLQKPGQSPQLLIYKVSNRFSGVPDRFSGSGSGADFTLKISRVEAEDVGVYYCAETSHVPWTFGQGTKLEIKRSDPASGAGSGSGSALNVTYVPQNPTTGIFPGDGSGKQETRAGVVHGAIGGAGVTALLALCLCLIFFIVKTHRRKAARTAVGRNDTHPTTGSASPKHQKKSKLHGPTETSSCSGAAPTVEMDEELHYASLNFHGMNPSKDTSTEYSEVRTQSHG

SEQ ID NO: 7040 - protein, 391 aa, Artificial Sequence
  source: /note="Description of Artificial Sequence: Synthetic Chimeric Antigen Receptor"
MALPVTALLLPLALLLHAARPGSGSGAQAAQVQLVQSGAEVKKPGASVKVSCKASGYSFPDYYINWVRQAPGQGLEWMGWIYFASGNSEYNQKFTGRVTMTRDTSSSTAYMELSSLRSEDTAVYFCASLYDYDWYFDVWGQGTMVTVSSGGGGSGGGGSGGGGSDIVMTQTPLSLSVTPGEPASISCKSSQSLVHSNGNTYLHWYLQKPGQSPQLLIYKVSNRFSGVPDRFSGSGSGADFTLKISRVEAEDVGVYYCAETSHVPWTFGQGTKLEIKRSDPASGAGSGSGSAVQAPSSSPMGIIVAVVTGIAVAAIVAAVVALIYCRKKRISALPGYPECREMGETLPEKPANPTNPDEADKVGAENTITYSLLMHPDALEEPDDQNRISHG

SEQ ID NO: 7041 - protein, 432 aa, Artificial Sequence
  source: /note="Description of Artificial Sequence: Synthetic Chimeric Antigen Receptor"
MALPVTALLLPLALLLHAARPGSGSGAQAAQVQLVQSGAEVKKPGASVKVSCKASGYSFPDYYINWVRQAPGQGLEWMGWIYFASGNSEYNQKFTGRVTMTRDTSSSTAYMELSSLRSEDTAVYFCASLYDYDWYFDVWGQGTMVTVSSGGGGSGGGGSGGGGSDIVMTQTPLSLSVTPGEPASISCKSSQSLVHSNGNTYLHWYLQKPGQSPQLLIYKVSNRFSGVPDRFSGSGSGADFTLKISRVEAEDVGVYYCAETSHVPWTFGQGTKLEIKRSDPASGAGSGSGSALNFTVPTGARSNHLTSGVIEGLLSTLGPATVALLFCYGLKRKIGRRSARDPLRSLPSPLPQEFTYLNSPTPGQLQPIYENVNVVSGDEVYSLAYYNQPEQESVAAETLGTHMEDKVSLDIYSRLRKANITDVDYEDAMSHG

SEQ ID NO: 7042 - protein, 415 aa, Artificial Sequence
  source: /note="Description of Artificial Sequence: Synthetic Chimeric Antigen Receptor"
MALPVTALLLPLALLLHAARPGSGSGAQAAQVQLVQSGAEVKKPGASVKVSCKASGYSFPDYYINWVRQAPGQGLEWMGWIYFASGNSEYNQKFTGRVTMTRDTSSSTAYMELSSLRSEDTAVYFCASLYDYDWYFDVWGQGTMVTVSSGGGGSGGGGSGGGGSDIVMTQTPLSLSVTPGEPASISCKSSQSLVHSNGNTYLHWYLQKPGQSPQLLIYKVSNRFSGVPDRFSGSGSGADFTLKISRVEAEDVGVYYCAETSHVPWTFGQGTKLEIKRSDPASGAGSGSGSAGPDGYRRDLMTAGVLWGLFGVLGFTGVALLLYALFHKISGESSATNEPRGASRPNPQEFTYSSPTPDMEELQPVYVNVGSVDVDVVYSQVWSMQQPESSANIRTLLENKDSQVIYSSVKKSSHG

SEQ ID NO: 7043 - protein, 465 aa, Artificial Sequence
  source: /note="Description of Artificial Sequence: Synthetic Chimeric Antigen Receptor"
MALPVTALLLPLALLLHAARPGSGSGAQAAQVQLVQSGAEVKKPGASVKVSCKASGYSFPDYYINWVRQAPGQGLEWMGWIYFASGNSEYNQKFTGRVTMTRDTSSSTAYMELSSLRSEDTAVYFCASLYDYDWYFDVWGQGTMVTVSSGGGGSGGGGSGGGGSDIVMTQTPLSLSVTPGEPASISCKSSQSLVHSNGNTYLHWYLQKPGQSPQLLIYKVSNRFSGVPDRFSGSGSGADFTLKISRVEAEDVGVYYCAETSHVPWTFGQGTKLEIKRSDPASGAGSGSGSAGTSRNRTGLTAAGITGLVLSILVLAAAAALLHYARARRKPGGLSATGTSSHSPSECQEPSSSRPSRIDPQEPTHSKPLAPMELEPMYSNANPGDSNPIYSQIWSIQHTKENSANCPMMHQEHEELTVLYSELKKTHPDDSAGEASSRGRAHEEDDEENYENVPRVLLASDHSHG

SEQ ID NO: 7044 - protein, 435 aa, Artificial Sequence
  source: /note="Description of Artificial Sequence: Synthetic Chimeric Antigen Receptor"
MALPVTALLLPLALLLHAARPGSGSGAQAAQVQLVQSGAEVKKPGASVKVSCKASGYSFPDYYINWVRQAPGQGLEWMGWIYFASGNSEYNQKFTGRVTMTRDTSSSTAYMELSSLRSEDTAVYFCASLYDYDWYFDVWGQGTMVTVSSGGGGSGGGGSGGGGSDIVMTQTPLSLSVTPGEPASISCKSSQSLVHSNGNTYLHWYLQKPGQSPQLLIYKVSNRFSGVPDRFSGSGSGADFTLKISRVEAEDVGVYYCAETSHVPWTFGQGTKLEIKRSDPASGAGSGSGSAVTVRETPGNRDGLVAAGATGGLLSALLLAVALLFHCWRRRKSGVGFLGDETRLPPAPGPGESSHSICPAQVELQSLYVDVHPKKGDLVYSEIQTTQLGEEEEANTSRTLLEDKDVSVVYSEVKTQHPDNSAGKISSKDEESSHG

SEQ ID NO: 7045 - protein, 437 aa, Artificial Sequence
  source: /note="Description of Artificial Sequence: Synthetic Chimeric Antigen Receptor"
MALPVTALLLPLALLLHAARPGSGSGAQAAQVQLVQSGAEVKKPGASVKVSCKASGYSFPDYYINWVRQAPGQGLEWMGWIYFASGNSEYNQKFTGRVTMTRDTSSSTAYMELSSLRSEDTAVYFCASLYDYDWYFDVWGQGTMVTVSSGGGGSGGGGSGGGGSDIVMTQTPLSLSVTPGEPASISCKSSQSLVHSNGNTYLHWYLQKPGQSPQLLIYKVSNRFSGVPDRFSGSGSGADFTLKISRVEAEDVGVYYCAETSHVPWTFGQGTKLEIKRSDPASGAGSGSGSALYITGLTANRSGPFATGVAGGLLSIAGLAAGALLLYCWLSRKAGRKPASDPARSPPDSDSQEPTYHNVPAWEELQPVYTNANPRGENVVYSEVRIIQEKKKHAVASDPRHLRNKGSPIIYSEVKVASTPVSGSLFLASSAPHRSHG

SEQ ID NO: 7046 - protein, 437 aa, Artificial Sequence
  source: /note="Description of Artificial Sequence: Synthetic Chimeric Antigen Receptor"
MALPVTALLLPLALLLHAARPGSGSGAQAAQVQLVQSGAEVKKPGASVKVSCKASGYSFPDYYINWVRQAPGQGLEWMGWIYFASGNSEYNQKFTGRVTMTRDTSSSTAYMELSSLRSEDTAVYFCASLYDYDWYFDVWGQGTMVTVSSGGGGSGGGGSGGGGSDIVMTQTPLSLSVTPGEPASISCKSSQSLVHSNGNTYLHWYLQKPGQSPQLLIYKVSNRFSGVPDRFSGSGSGADFTLKISRVEAEDVGVYYCAETSHVPWTFGQGTKLEIKRSDPASGAGSGSGSAPYEWSKSSDPLLVSVTGNPSNSWPSPTEPSSKTGNPRHLHILIGTSVVIILFILLFFLLHRWCSNKKNAAVMDQESAGNRTANSEDSDEQDPQEVTYTQLNHCVFTQRKITRPSQRPKTPPTDIIVYTELPNAESRSKVVSCPSHG

SEQ ID NO: 7047 - protein, 437 aa, Artificial Sequence
  source: /note="Description of Artificial Sequence: Synthetic Chimeric Antigen Receptor"
MALPVTALLLPLALLLHAARPGSGSGAQAAQVQLVQSGAEVKKPGASVKVSCKASGYSFPDYYINWVRQAPGQGLEWMGWIYFASGNSEYNQKFTGRVTMTRDTSSSTAYMELSSLRSEDTAVYFCASLYDYDWYFDVWGQGTMVTVSSGGGGSGGGGSGGGGSDIVMTQTPLSLSVTPGEPASISCKSSQSLVHSNGNTYLHWYLQKPGQSPQLLIYKVSNRFSGVPDRFSGSGSGADFTLKISRVEAEDVGVYYCAETSHVPWTFGQGTKLEIKRSDPASGAGSGSGSAPYEWSNSSDPLLVSVIGNPSNSWPSPTEPSSKTGNPRHLHILIGTSVVIILFILLFFLLHRWCSNKKNAAVMDQESAGNRTANSEDSDEQDPQEVTYTQLNHCVFTQRKITRPSQRPKTPPTDIIVYAELPNAESRSKVVSCPSHG

SEQ ID NO: 7048 - protein, 430 aa, Artificial Sequence
  source: /note="Description of Artificial Sequence: Synthetic Chimeric Antigen Receptor"
MALPVTALLLPLALLLHAARPGSGSGAQAAQVQLVQSGAEVKKPGASVKVSCKASGYSFPDYYINWVRQAPGQGLEWMGWIYFASGNSEYNQKFTGRVTMTRDTSSSTAYMELSSLRSEDTAVYFCASLYDYDWYFDVWGQGTMVTVSSGGGGSGGGGSGGGGSDIVMTQTPLSLSVTPGEPASISCKSSQSLVHSNGNTYLHWYLQKPGQSPQLLIYKVSNRFSGVPDRFSGSGSGADFTLKISRVEAEDVGVYYCAETSHVPWTFGQGTKLEIKRSDPASGAGSGSGSAPYEWSNSSDPLLVSVTGNPSNSWPSPTEPSSETGNPRHLHVLIGTSVVIILFILLLFFLLHRWCCNKKNAVVMDQEPAGNRTVNREDSDEQDPQEVTYAQLNHCVFTQRKITRPSQRPKTPPTDIIVYTELPNAEPSHG

SEQ ID NO: 7049 - protein, 469 aa, Artificial Sequence
  source: /note="Description of Artificial Sequence: Synthetic Chimeric Antigen Receptor"
MALPVTALLLPLALLLHAARPGSGSGAQAAQVQLVQSGAEVKKPGASVKVSCKASGYSFPDYYINWVRQAPGQGLEWMGWIYFASGNSEYNQKFTGRVTMTRDTSSSTAYMELSSLRSEDTAVYFCASLYDYDWYFDVWGQGTMVTVSSGGGGSGGGGSGGGGSDIVMTQTPLSLSVTPGEPASISCKSSQSLVHSNGNTYLHWYLQKPGQSPQLLIYKVSNRFSGVPDRFSGSGSGADFTLKISRVEAEDVGVYYCAETSHVPWTFGQGTKLEIKRSDPASGAGSGSGSAPYEWSDASDPLPVSVTGNPSSSWPSPTEPSFKTGIARHLHAVIRYSVAIILFTILPFFLLHRWCSKKKDAAVMNQEPAGHRTVNREDSDEQDPQEVTYAQLDHCIFTQRKITGPSQRSKRPSTDTSVCIELPNAEPRALSPAHEHHSQALMGSSRETTALSQTQLASSHVPAAGISHG

SEQ ID NO: 7050 - protein, 469 aa, Artificial Sequence
  source: /note="Description of Artificial Sequence: Synthetic Chimeric Antigen Receptor"
MALPVTALLLPLALLLHAARPGSGSGAQAAQVQLVQSGAEVKKPGASVKVSCKASGYSFPDYYINWVRQAPGQGLEWMGWIYFASGNSEYNQKFTGRVTMTRDTSSSTAYMELSSLRSEDTAVYFCASLYDYDWYFDVWGQGTMVTVSSGGGGSGGGGSGGGGSDIVMTQTPLSLSVTPGEPASISCKSSQSLVHSNGNTYLHWYLQKPGQSPQLLIYKVSNRFSGVPDRFSGSGSGADFTLKISRVEAEDVGVYYCAETSHVPWTFGQGTKLEIKRSDPASGAGSGSGSAPYEWSDPSDPLLVSVTGNSSSSSSSPTEPSSKTGIRRHLHILIGTSVAIILFIILFFFLLHCCCSNKKNAAVMDQEPAGDRTVNREDSDDQDPQEVTYAQLDHCVFTQTKITSPSQRPKTPPTDTTMYMELPNAKPRSLSPAHKHHSQALRGSSRETTALSQNRVASSHVPAAGISHG

SEQ ID NO: 7051 - protein, 438 aa, Artificial Sequence
  source: /note="Description of Artificial Sequence: Synthetic Chimeric Antigen Receptor"
MALPVTALLLPLALLLHAARPGSGSGAQAAQVQLVQSGAEVKKPGASVKVSCKASGYSFPDYYINWVRQAPGQGLEWMGWIYFASGNSEYNQKFTGRVTMTRDTSSSTAYMELSSLRSEDTAVYFCASLYDYDWYFDVWGQGTMVTVSSGGGGSGGGGSGGGGSDIVMTQTPLSLSVTPGEPASISCKSSQSLVHSNGNTYLHWYLQKPGQSPQLLIYKVSNRFSGVPDRFSGSGSGADFTLKISRVEAEDVGVYYCAETSHVPWTFGQGTKLEIKRSDPASGAGSGSGSAPYEWSDPSDPLLVSVTGNPSSSWPSPTEPSSKSGNPRHLHILIGTSVVIILFILLLFFLLHLWCSNKKNAAVMDQEPAGNRTANSEDSDEQDPEEVTYAQLDHCVFTQRKITRPSQRPKTPPTDTILYTELPNAKPRSKVVSCPSHG

SEQ ID NO: 7052 - protein, 449 aa, Artificial Sequence
  source: /note="Description of Artificial Sequence: Synthetic Chimeric Antigen Receptor"
MALPVTALLLPLALLLHAARPGSGSGAQAAQVQLVQSGAEVKKPGASVKVSCKASGYSFPDYYINWVRQAPGQGLEWMGWIYFASGNSEYNQKFTGRVTMTRDTSSSTAYMELSSLRSEDTAVYFCASLYDYDWYFDVWGQGTMVTVSSGGGGSGGGGSGGGGSDIVMTQTPLSLSVTPGEPASISCKSSQSLVHSNGNTYLHWYLQKPGQSPQLLIYKVSNRFSGVPDRFSGSGSGADFTLKISRVEAEDVGVYYCAETSHVPWTFGQGTKLEIKRSDPASGAGSGSGSAPCVWSNSSDPLLVSVTGNPSSSWPSPTEPSSKSGICRHLHVLIGTSVVIFLFILLLFFLLYRWCSNKKNAAVMDQEPAGDRTVNRQDSDEQDPQEVTYAQLDHCVFIQRKISRPSQRPKTPLTDTSVYTELPNAEPRSKVVSCPRAPQSGLEGVFSHG

SEQ ID NO: 7053 - protein, 409 aa, Artificial Sequence
  source: /note="Description of Artificial Sequence: Synthetic Chimeric Antigen Receptor"
MALPVTALLLPLALLLHAARPGSGSGAQAAQVQLVQSGAEVKKPGASVKVSCKASGYSFPDYYINWVRQAPGQGLEWMGWIYFASGNSEYNQKFTGRVTMTRDTSSSTAYMELSSLRSEDTAVYFCASLYDYDWYFDVWGQGTMVTVSSGGGGSGGGGSGGGGSDIVMTQTPLSLSVTPGEPASISCKSSQSLVHSNGNTYLHWYLQKPGQSPQLLIYKVSNRFSGVPDRFSGSGSGADFTLKISRVEAEDVGVYYCAETSHVPWTFGQGTKLEIKRSDPASGAGSGSGSASFRALPHAWSDPSDPLPVSVTGNSRYLHALIGTSVVIIPFAILLFFLLHRWCANKKNAVVMDQEPAGNRTVNREDSDEQDPQEVTYAQLNHCVFTQRKITRPSQRPKTPPTDTSVSHG

SEQ ID NO: 7054 - protein, 473 aa, Artificial Sequence
  source: /note="Description of Artificial Sequence: Synthetic Chimeric Antigen Receptor"
MALPVTALLLPLALLLHAARPGSGSGAQAAQVQLVQSGAEVKKPGASVKVSCKASGYSFPDYYINWVRQAPGQGLEWMGWIYFASGNSEYNQKFTGRVTMTRDTSSSTAYMELSSLRSEDTAVYFCASLYDYDWYFDVWGQGTMVTVSSGGGGSGGGGSGGGGSDIVMTQTPLSLSVTPGEPASISCKSSQSLVHSNGNTYLHWYLQKPGQSPQLLIYKVSNRFSGVPDRFSGSGSGADFTLKISRVEAEDVGVYYCAETSHVPWTFGQGTKLEIKRSDPASGAGSGSGSAGPSMGSSPPPTGPISTPAGPEDQPLTPTGSDPQSGLGRHLGVVIGILVAVVLLLLLLLLLFLILRHRRQGKHWTSTQRKADFQHPAGAVGPEPTDRGLQWRSSPAADAQEENLYAAVKDTQPEDGVEMDTRAAASEAPQDVTYAQLHSLTLRRKATEPPPSQEREPPAEPSIYATLAIHSHG

SEQ ID NO: 7055 - protein, 506 aa, Artificial Sequence
  source: /note="Description of Artificial Sequence: Synthetic Chimeric Antigen Receptor"
MALPVTALLLPLALLLHAARPGSGSGAQAAQVQLVQSGAEVKKPGASVKVSCKASGYSFPDYYINWVRQAPGQGLEWMGWIYFASGNSEYNQKFTGRVTMTRDTSSSTAYMELSSLRSEDTAVYFCASLYDYDWYFDVWGQGTMVTVSSGGGGSGGGGSGGGGSDIVMTQTPLSLSVTPGEPASISCKSSQSLVHSNGNTYLHWYLQKPGQSPQLLIYKVSNRFSGVPDRFSGSGSGADFTLKISRVEAEDVGVYYCAETSHVPWTFGQGTKLEIKRSDPASGAGSGSGSAGHSGGSSLPPTGPPSTPGLGRYLEVLIGVSVAFVLLLFLLLFLLLRRQRHSKHRTSDQRKTDFQRPAGAAETEPKDRGLLRRSSPAADVQEENLYAAVKDTQSEDRVELDSQSPHDEDPQAVTYAPVKHSSPRREMASPPSSLSGEFLDTKDRQVEEDRQMDTEAAASEASQDVTYAQLHSLTLRRKATEPPPSQEGEPPAEPSIYATLAIHSHG

SEQ ID NO: 7056 - protein, 524 aa, Artificial Sequence
  source: /note="Description of Artificial Sequence: Synthetic Chimeric Antigen Receptor"
MALPVTALLLPLALLLHAARPGSGSGAQAAQVQLVQSGAEVKKPGASVKVSCKASGYSFPDYYINWVRQAPGQGLEWMGWIYFASGNSEYNQKFTGRVTMTRDTSSSTAYMELSSLRSEDTAVYFCASLYDYDWYFDVWGQGTMVTVSSGGGGSGGGGSGGGGSDIVMTQTPLSLSVTPGEPASISCKSSQSLVHSNGNTYLHWYLQKPGQSPQLLIYKVSNRFSGVPDRFSGSGSGADFTLKISRVEAEDVGVYYCAETSHVPWTFGQGTKLEIKRSDPASGAGSGSGSAGSLEGPRPSPTRSVSTAAGPEDQPLMPTGSVPHSGLRRHWEVLIGVLVVSILLLSLLLFLLLQHWRQGKHRTLAQRQADFQRPPGAAEPEPKDGGLQRRSSPAADVQGENFCAAVKNTQPEDGVEMDTRQSPHDEDPQAVTYAKVKHSRPRREMASPPSPLSGEFLDTKDRQAEEDRQMDTEAAASEAPQDVTYAQLHSFTLRQKATEPPPSQEGASPAEPSVYATLAIHSHG

SEQ ID NO: 7057 - protein, 466 aa, Artificial Sequence
  source: /note="Description of Artificial Sequence: Synthetic Chimeric Antigen Receptor"
MALPVTALLLPLALLLHAARPGSGSGAQAAQVQLVQSGAEVKKPGASVKVSCKASGYSFPDYYINWVRQAPGQGLEWMGWIYFASGNSEYNQKFTGRVTMTRDTSSSTAYMELSSLRSEDTAVYFCASLYDYDWYFDVWGQGTMVTVSSGGGGSGGGGSGGGGSDIVMTQTPLSLSVTPGEPASISCKSSQSLVHSNGNTYLHWYLQKPGQSPQLLIYKVSNRFSGVPDRFSGSGSGADFTLKISRVEAEDVGVYYCAETSHVPWTFGQGTKLEIKRSDPASGAGSGSGSAGPSGDPSLSPTGSTPTPGPEDQPLTPTGLDPQSGLGRHLGVVTGVSVAFVLLLFLLLFLLLRHRHQSKHRTSAHFYRPAGAAGPEPKDQGLQKRASPVADIQEEILNAAVKDTQPKDGVEMDARAAASEAPQDVTYAQLHSLTLRREATEPPPSQEREPPAEPSIYAPLAIHSHG

SEQ ID NO: 7058 - protein, 424 aa, Artificial Sequence
  source: /note="Description of Artificial Sequence: Synthetic Chimeric Antigen Receptor"
MALPVTALLLPLALLLHAARPGSGSGAQAAQVQLVQSGAEVKKPGASVKVSCKASGYSFPDYYINWVRQAPGQGLEWMGWIYFASGNSEYNQKFTGRVTMTRDTSSSTAYMELSSLRSEDTAVYFCASLYDYDWYFDVWGQGTMVTVSSGGGGSGGGGSGGGGSDIVMTQTPLSLSVTPGEPASISCKSSQSLVHSNGNTYLHWYLQKPGQSPQLLIYKVSNRFSGVPDRFSGSGSGADFTLKISRVEAEDVGVYYCAETSHVPWTFGQGTKLEIKRSDPASGAGSGSGSAMPSTGGDSCPFCLKLLLPGLLLLLVVIILILAFWVLPKYKTRKAMRNNVPRDRGDTAMEVGIYANILEKQAKEESVPEVGSRPCVSTAQDEAKHSQELQYATPVFQEVAPREQEACDSYKSGYVYSELNFSHG

SEQ ID NO: 7059 - protein, 417 aa, Artificial Sequence
  source: /note="Description of Artificial Sequence: Synthetic Chimeric Antigen Receptor"
MALPVTALLLPLALLLHAARPGSGSGAQAAQVQLVQSGAEVKKPGASVKVSCKASGYSFPDYYINWVRQAPGQGLEWMGWIYFASGNSEYNQKFTGRVTMTRDTSSSTAYMELSSLRSEDTAVYFCASLYDYDWYFDVWGQGTMVTVSSGGGGSGGGGSGGGGSDIVMTQTPLSLSVTPGEPASISCKSSQSLVHSNGNTYLHWYLQKPGQSPQLLIYKVSNRFSGVPDRFSGSGSGADFTLKISRVEAEDVGVYYCAETSHVPWTFGQGTKLEIKRSDPASGAGSGSGSAPGHIRLYVVEKENLPVFPVWVVVGIVTAVVLGLTLLISMILAVLYRRKNSKRDYTGCSTSESLSPVKQAPRKSPSDTEGLVKSLPSGSHQGPVIYAQLDHSGGHHSDKINKSESVVYADIRKNSHG

SEQ ID NO: 7060 - protein, 431 aa, Artificial Sequence
  source: /note="Description of Artificial Sequence: Synthetic Chimeric Antigen Receptor"
MALPVTALLLPLALLLHAARPQVQLVQSGAEVKKPGASVKVSCKASGYSFPDYYINWVRQAPGQGLEWMGWIYFASGNSEYNQKFTGRVTMTRDTSSSTAYMELSSLRSEDTAVYFCASLYDYDWYFDVWGQGTMVTVSSGGGGSGGGGSGGGGSDIVMTQTPLSLSVTPGEPASISCKSSQSLVHSNGNTYLHWYLQKPGQSPQLLIYKVSNRFSGVPDRFSGSGSGADFTLKISRVEAEDVGVYYCAETSHVPWTFGQGTKLEIKYPLTFGAGTMLDLKRAAATERRAEVPTAHPSPSPRPAGQFQTLVVGVVGGLLGSLVLLVWVLAVICSRAARGTIGARRTGQPLKEDPSAVPVFSVDYGELDFQWREKTPEPPVPCVPEQTEYATIVFPSGMGTSSPARRGSADGPRSAQPLRPEDGHCSWPLSH

SEQ ID NO: 7061 - protein, 437 aa, Artificial Sequence
  source: /note="Description of Artificial Sequence: Synthetic Chimeric Antigen Receptor"
MALPVTALLLPLALLLHAARPGSGSGAQAAQVQLVQSGAEVKKPGASVKVSCKASGYSFPDYYINWVRQAPGQGLEWMGWIYFASGNSEYNQKFTGRVTMTRDTSSSTAYMELSSLRSEDTAVYFCASLYDYDWYFDVWGQGTMVTVSSGGGGSGGGGSGGGGSDIVMTQTPLSLSVTPGEPASISCKSSQSLVHSNGNTYLHWYLQKPGQSPQLLIYKVSNRFSGVPDRFSGSGSGADFTLKISRVEAEDVGVYYCAETSHVPWTFGQGTKLEIKRSDPASGAGSGSGSAERRAEVPTAHPSPSPRPAGQFQTLVVGVVGGLLGSLVLLVWVLAVICSRAARGTIGARRTGQPLKEDPSAVPVFSVDYGELDFQWREKTPEPPVPCVPEQTEYATIVFPSGMGTSSPARRGSADGPRSAQPLRPEDGHCSWPLSHG

SEQ ID NO: 7062 - protein, 441 aa, Artificial Sequence
  source: /note="Description of Artificial Sequence: Synthetic Chimeric Antigen Receptor"
MALPVTALLLPLALLLHAARPGSGSGAQAAQVQLVQSGAEVKKPGASVKVSCKASGYSFPDYYINWVRQAPGQGLEWMGWIYFASGNSEYNQKFTGRVTMTRDTSSSTAYMELSSLRSEDTAVYFCASLYDYDWYFDVWGQGTMVTVSSGGGGSGGGGSGGGGSDIVMTQTPLSLSVTPGEPASISCKSSQSLVHSNGNTYLHWYLQKPGQSPQLLIYKVSNRFSGVPDRFSGSGSGADFTLKISRVEAEDVGVYYCAETSHVPWTFGQGTKLEIKRSDPASGAGSGSGSAVRVILAPWKKGLIAVVIIGVIIALLIIAAKCYFLRKAKAKQMPVEMSRPAVPLLNSNNEKMSDPNMEANSHYGHNDDVGNHAMKPINDNKEPLNSDVQYTEVQVSSAESHKDLGKKDTETVYSEVRKAVPDAVESRYSRTEGSLDGTSHG

SEQ ID NO: 7063 - protein, 447 aa, Artificial Sequence
  source: /note="Description of Artificial Sequence: Synthetic Chimeric Antigen Receptor"
MALPVTALLLPLALLLHAARPGSGSGAQAAQVQLVQSGAEVKKPGASVKVSCKASGYSFPDYYINWVRQAPGQGLEWMGWIYFASGNSEYNQKFTGRVTMTRDTSSSTAYMELSSLRSEDTAVYFCASLYDYDWYFDVWGQGTMVTVSSGGGGSGGGGSGGGGSDIVMTQTPLSLSVTPGEPASISCKSSQSLVHSNGNTYLHWYLQKPGQSPQLLIYKVSNRFSGVPDRFSGSGSGADFTLKISRVEAEDVGVYYCAETSHVPWTFGQGTKLEIKRSDPASGAGSGSGSAQAVTTTTQRPSSMTTTWRLSSTTTTTGLRVTQGKRRSDSWHISLETAVGVAVAVTVLGIMILGLICLLRWRRRKGQQRTKATTPAREPFQNTEEPYENIRNEGQNTDPKLNPKDDGIVYASLALSSSTSPKAPPSHRPLKSPQNETLYSVLKASHG

SEQ ID NO: 7064 - protein, 383 aa, Artificial Sequence
  source: /note="Description of Artificial Sequence: Synthetic Chimeric Antigen Receptor"
MALPVTALLLPLALLLHAARPGSGSGAQAAQVQLVQSGAEVKKPGASVKVSCKASGYSFPDYYINWVRQAPGQGLEWMGWIYFASGNSEYNQKFTGRVTMTRDTSSSTAYMELSSLRSEDTAVYFCASLYDYDWYFDVWGQGTMVTVSSGGGGSGGGGSGGGGSDIVMTQTPLSLSVTPGEPASISCKSSQSLVHSNGNTYLHWYLQKPGQSPQLLIYKVSNRFSGVPDRFSGSGSGADFTLKISRVEAEDVGVYYCAETSHVPWTFGQGTKLEIKRSDPASGAGSGSGSAVKEGPPSEHSGISRNAIIFLVLGILVFLILLGIGIYFYWSKCSREVLWHCHLCPSSTEHASASANGHVSYSAVSRENSSSQDPQTEGTRSHG

SEQ ID NO: 7065 - protein, 550 aa, Artificial Sequence
  source: /note="Description of Artificial Sequence: Synthetic Chimeric Antigen Receptor"
MALPVTALLLPLALLLHAARPGSGSGAQAAQVQLVQSGAEVKKPGASVKVSCKASGYSFPDYYINWVRQAPGQGLEWMGWIYFASGNSEYNQKFTGRVTMTRDTSSSTAYMELSSLRSEDTAVYFCASLYDYDWYFDVWGQGTMVTVSSGGGGSGGGGSGGGGSDIVMTQTPLSLSVTPGEPASISCKSSQSLVHSNGNTYLHWYLQKPGQSPQLLIYKVSNRFSGVPDRFSGSGSGADFTLKISRVEAEDVGVYYCAETSHVPWTFGQGTKLEIKRSDPASGAGSGSGSAVHYSPKLLGPSCSWEAEGLHCSCSSQASPAPSLRWWLGEELLEGNSSQDSFEVTPSSAGPWANSSLSLHGGLSSGLRLRCEAWNVHGAQSGSILQLPDKKGLISTAFSNGAFLGIGITALLFLCLALIIMKILPKRRTQTETPRPRFSRHSTILDYINVVPTAGPLAQKRNQKATPNSPRTPLPPGAPSPESKKNQKKQYQLPSFPEPKSSTQAPESQESQEELHYATLNFPGVRPRPEARMPKGTQADYAEVKFQSHG

SEQ ID NO: 7066 - protein, 540 aa, Artificial Sequence
  source: /note="Description of Artificial Sequence: Synthetic Chimeric Antigen Receptor"
MALPVTALLLPLALLLHAARPGSGSGAQAAQVQLVQSGAEVKKPGASVKVSCKASGYSFPDYYINWVRQAPGQGLEWMGWIYFASGNSEYNQKFTGRVTMTRDTSSSTAYMELSSLRSEDTAVYFCASLYDYDWYFDVWGQGTMVTVSSGGGGSGGGGSGGGGSDIVMTQTPLSLSVTPGEPASISCKSSQSLVHSNGNTYLHWYLQKPGQSPQLLIYKVSNRFSGVPDRFSGSGSGADFTLKISRVEAEDVGVYYCAETSHVPWTFGQGTKLEIKRSDPASGAGSGSGSAVHYPPQLLGPSCSWEAEGLHCSCSSQASPAPSLRWWLGEELLEGNSSQGSFEVTPSSAGPWANSSLSLHGGLSSGLRLRCKAWNVHGAQSGSVFQLLPGKLEHGGGLGLGAALGAGVAALLAFCSCLVVFRVKICRKEARKRAAAEQDVPSTLGPISQGHQHECSAGSSQDHPPPGAATYTPGKGEEQELHYASLSFQGLRLWEPADQEAPSTTEYSEIKIHTGQPLRGPGFGLQLEREMSGMVPKSHG

SEQ ID NO: 7067 - protein, 427 aa, Artificial Sequence
  source: /note="Description of Artificial Sequence: Synthetic Chimeric Antigen Receptor"
MALPVTALLLPLALLLHAARPGSGSGAQAAQVQLVQSGAEVKKPGASVKVSCKASGYSFPDYYINWVRQAPGQGLEWMGWIYFASGNSEYNQKFTGRVTMTRDTSSSTAYMELSSLRSEDTAVYFCASLYDYDWYFDVWGQGTMVTVSSGGGGSGGGGSGGGGSDIVMTQTPLSLSVTPGEPASISCKSSQSLVHSNGNTYLHWYLQKPGQSPQLLIYKVSNRFSGVPDRFSGSGSGADFTLKISRVEAEDVGVYYCAETSHVPWTFGQGTKLEIKRSDPASGAGSGSGSALQNEYTGKMRPISGVTLGAFGGAGATALVFLYFCIIFVVVRSCRKKSARPAVGVGDTGMEDANAVRGSASQGPLIESPADDSPPHHAPPALATPSPEEGEIQYASLSFHKARPQYPQEQEAIGYEYSEINIPKSHG

SEQ ID NO: 7068 - protein, 515 aa, Artificial Sequence
  source: /note="Description of Artificial Sequence: Synthetic Chimeric Antigen Receptor"
MALPVTALLLPLALLLHAARPGSGSGAQAAQVQLVQSGAEVKKPGASVKVSCKASGYSFPDYYINWVRQAPGQGLEWMGWIYFASGNSEYNQKFTGRVTMTRDTSSSTAYMELSSLRSEDTAVYFCASLYDYDWYFDVWGQGTMVTVSSGGGGSGGGGSGGGGSDIVMTQTPLSLSVTPGEPASISCKSSQSLVHSNGNTYLHWYLQKPGQSPQLLIYKVSNRFSGVPDRFSGSGSGADFTLKISRVEAEDVGVYYCAETSHVPWTFGQGTKLEIKRSDPASGAGSGSGSAVYSLPQLLGPSCSWEAEGLHCRCSFRAWPAPSLCWRLEEKPLEGNSSQGSFKVNSSSPGPWANSSLILHGGLNSDLKVSCKAWNIYGSQSGSVLLLQGRSNLGTGVVPAALGGAGVMALLCICLCLIFFLIVKARRKQAAGRPEKMDDEDPIMGTITSGSRKKPWPDSPGDQASPPGDAPPLEEQKELHYASLSFSEMKSREPKDQEAPSTTEYSEIKTSKSHG

SEQ ID NO: 7069 - protein, 414 aa, Artificial Sequence
  source: /note="Description of Artificial Sequence: Synthetic Chimeric Antigen Receptor"
MALPVTALLLPLALLLHAARPGSGSGAQAAQVQLVQSGAEVKKPGASVKVSCKASGYSFPDYYINWVRQAPGQGLEWMGWIYFASGNSEYNQKFTGRVTMTRDTSSSTAYMELSSLRSEDTAVYFCASLYDYDWYFDVWGQGTMVTVSSGGGGSGGGGSGGGGSDIVMTQTPLSLSVTPGEPASISCKSSQSLVHSNGNTYLHWYLQKPGQSPQLLIYKVSNRFSGVPDRFSGSGSGADFTLKISRVEAEDVGVYYCAETSHVPWTFGQGTKLEIKRSDPASGAGSGSGSALFVHWKPEGRAGGVLGAVWGASITTLVFLCVCFIFRVKTRRKKAAQPVQNTDDVNPVMVSGSRGHQHQFQTGIVSDHPAEAGPISEDEQELHYAVLHFHKVQPQEPKVTDTEYSEIKIHKSHG

SEQ ID NO: 7070 - protein, 425 aa, Artificial Sequence
  source: /note="Description of Artificial Sequence: Synthetic Chimeric Antigen Receptor"
MALPVTALLLPLALLLHAARPGSGSGAQAAQVQLVQSGAEVKKPGASVKVSCKASGYSFPDYYINWVRQAPGQGLEWMGWIYFASGNSEYNQKFTGRVTMTRDTSSSTAYMELSSLRSEDTAVYFCASLYDYDWYFDVWGQGTMVTVSSGGGGSGGGGSGGGGSDIVMTQTPLSLSVTPGEPASISCKSSQSLVHSNGNTYLHWYLQKPGQSPQLLIYKVSNRFSGVPDRFSGSGSGADFTLKISRVEAEDVGVYYCAETSHVPWTFGQGTKLEIKRSDPASGAGSGSGSALQQEYTGKMRPVSGVLLGAVGGAGATALVFLSFCVIFIVVRSCRKKSARPAADVGDIGMKDANTIRGSASQGNLTESWADDNPRHHGLAAHSSGEEREIQYAPLSFHKGEPQDLSGQEATNNEYSEIKIPKSHG

SEQ ID NO: 7071 - protein, 449 aa, Artificial Sequence
  source: /note="Description of Artificial Sequence: Synthetic Chimeric Antigen Receptor"
MALPVTALLLPLALLLHAARPGSGSGAQAAQVQLVQSGAEVKKPGASVKVSCKASGYSFPDYYINWVRQAPGQGLEWMGWIYFASGNSEYNQKFTGRVTMTRDTSSSTAYMELSSLRSEDTAVYFCASLYDYDWYFDVWGQGTMVTVSSGGGGSGGGGSGGGGSDIVMTQTPLSLSVTPGEPASISCKSSQSLVHSNGNTYLHWYLQKPGQSPQLLIYKVSNRFSGVPDRFSGSGSGADFTLKISRVEAEDVGVYYCAETSHVPWTFGQGTKLEIKRSDPASGAGSGSGSALQNEGTGTSRPVSQVTLAAVGGAGATALAFLSFCIIFIIVRSCRKKSARPAAGVGDTGMEDAKAIRGSASQGPLTESWKDGNPLKKPPPAVAPSSGEEGELHYATLSFHKVKPQDPQGQEATDSEYSEIKIHKRETAETQACLRNHNPSSKEVRGSHG

SEQ ID NO: 7072 - protein, 421 aa, Artificial Sequence
  source: /note="Description of Artificial Sequence: Synthetic Chimeric Antigen Receptor"
MALPVTALLLPLALLLHAARPGSGSGAQAAQVQLVQSGAEVKKPGASVKVSCKASGYSFPDYYINWVRQAPGQGLEWMGWIYFASGNSEYNQKFTGRVTMTRDTSSSTAYMELSSLRSEDTAVYFCASLYDYDWYFDVWGQGTMVTVSSGGGGSGGGGSGGGGSDIVMTQTPLSLSVTPGEPASISCKSSQSLVHSNGNTYLHWYLQKPGQSPQLLIYKVSNRFSGVPDRFSGSGSGADFTLKISRVEAEDVGVYYCAETSHVPWTFGQGTKLEIKRSDPASGAGSGSGSALQSKATSGVTQGVVGGAGATALVFLSFCVIFVVVRSCRKKSARPAAGVGDTGIEDANAVRGSASQGPLTEPWAEDSPPDQPPPASARSSVGEGELQYASLSFQMVKPWDSRGQEATDTEYSEIKIHRSHG

SEQ ID NO: 7073 - protein, 533 aa, Artificial Sequence
  source: /note="Description of Artificial Sequence: Synthetic Chimeric Antigen Receptor"
MALPVTALLLPLALLLHAARPGSGSGAQAAQVQLVQSGAEVKKPGASVKVSCKASGYSFPDYYINWVRQAPGQGLEWMGWIYFASGNSEYNQKFTGRVTMTRDTSSSTAYMELSSLRSEDTAVYFCASLYDYDWYFDVWGQGTMVTVSSGGGGSGGGGSGGGGSDIVMTQTPLSLSVTPGEPASISCKSSQSLVHSNGNTYLHWYLQKPGQSPQLLIYKVSNRFSGVPDRFSGSGSGADFTLKISRVEAEDVGVYYCAETSHVPWTFGQGTKLEIKRSDPASGAGSGSGSAVHKESGNGHNIWVILVVTLVVPLLLVAVLIVCCCIGSGCGGDPKCMDRVCFWRLGLLRGPGAEDNAHNEILSNADSLSTFVSEQQMESQEPADLTGVTVQSPGEAQCLLGPAEAEGSQRRRLLVPANGADPTETLMLFFDKFANIVPFDSWDQLMRQLDLTKNEIDVVRAGTAGPGDALYAMLMKWVNKTGRNASIHTLLDALERMEERHAKEKIQDLLVDSGKFIYLEDGTGSAVSLESHG

SEQ ID NO: 7074 - protein, 556 aa, Artificial Sequence
  source: /note="Description of Artificial Sequence: Synthetic Chimeric Antigen Receptor"
MALPVTALLLPLALLLHAARPGSGSGAQAAQVQLVQSGAEVKKPGASVKVSCKASGYSFPDYYINWVRQAPGQGLEWMGWIYFASGNSEYNQKFTGRVTMTRDTSSSTAYMELSSLRSEDTAVYFCASLYDYDWYFDVWGQGTMVTVSSGGGGSGGGGSGGGGSDIVMTQTPLSLSVTPGEPASISCKSSQSLVHSNGNTYLHWYLQKPGQSPQLLIYKVSNRFSGVPDRFSGSGSGADFTLKISRVEAEDVGVYYCAETSHVPWTFGQGTKLEIKRSDPASGAGSGSGSAVHKESGTKHSGEAPAVEETVTSSPGTPASPCSLSGIIIGVTVAAVVLIVAVFVCKSLLWKKVLPYLKGICSGGGGDPERVDRSSQRPGAEDNVLNEIVSILQPTQVPEQEMEVQEPAEPTGVNMLSPGESEHLLEPAEAERSQRRRLLVPANEGDPTETLRQCFDDFADLVPFDSWEPLMRKLGLMDNEIKVAKAEAAGHRDTLYTMLIKWVNKTGRDASVHTLLDALETLGERLAKQKIEDHLLSSGKFMYLEGNADSAMSSHG

SEQ ID NO: 7075 - protein, 500 aa, Artificial Sequence
  source: /note="Description of Artificial Sequence: Synthetic Chimeric Antigen Receptor"
MALPVTALLLPLALLLHAARPGSGSGAQAAQVQLVQSGAEVKKPGASVKVSCKASGYSFPDYYINWVRQAPGQGLEWMGWIYFASGNSEYNQKFTGRVTMTRDTSSSTAYMELSSLRSEDTAVYFCASLYDYDWYFDVWGQGTMVTVSSGGGGSGGGGSGGGGSDIVMTQTPLSLSVTPGEPASISCKSSQSLVHSNGNTYLHWYLQKPGQSPQLLIYKVSNRFSGVPDRFSGSGSGADFTLKISRVEAEDVGVYYCAETSHVPWTFGQGTKLEIKRSDPASGAGSGSGSAKNESAASSTGKTPAAEETVTTILGMLASPYHYLIIIVVLVIILAVVVVGFSCRKKFISYLKGICSGGGGGPERVHRVLFRRRSCPSRVPGAEDNARNETLSNRYLQPTQVSEQEIQGQELAELTGVTVELPEEPQRLLEQAEAEGCQRRRLLVPVNDADSADISTLLDASATLEEGHAKETIQDQLVGSEKLFYEEDEAGSATSCLSHG

SEQ ID NO: 7076 - protein, 741 aa, Artificial Sequence
  source: /note="Description of Artificial Sequence: Synthetic Chimeric Antigen Receptor"
MSELIKENMHMKLYMEGTVDNHHFKCTSEGEGKPYEGTQTMRIKVVEGGPLPFAFDILATSFLYGSKTFINHTQGIPDFFKQSFPEGFTWERVTTYEDGGVLTATQDTSLQDGCLIYNVKIRGVNFTSNGPVMQKKTLGWEAFTETLYPADGGLEGRNDMALKLVGGSHLIANIKTTYRSKKPAKNLKMPGVYYVDYRLERIKEANNETYVEQHEVAVARYCDLPSKLGHKLNRAEGRGSLLTCGDVEENPGPMALPVTALLLPLALLLHAARPEVQLVESGGGLVQPGRSLRLSCAASGFTFNDYAMHWVRQAPGKGLEWVSTISWNSGSIGYADSVKGRFTISRDNAKKSLYLQMNSLRAEDTALYYCAKDIQYGNYYYGMDVWGQGTTVTVSSGGGGSGGGGSGGGGSEIVLTQSPATLSLSPGERATLSCRASQSVSSYLAWYQQKPGQAPRLLIYDASNRATGIPARFSGSGSGTDFTLTISSLEPEDFAVYYCQQRSNWPITFGQGTRLEIKTTTPAPRPPTPAPTIASQPLSLRPEACRPAAGGAVHTRGLDFACDIYIWAPLAGTCGVLLLSLVITLYCKRGRKKLLYIFKQPFMRPVQTTQEEDGCSCRFPEEEEGGCELRVKFSRSADAPAYQQGQNQLYNELNLGRREEYDVLDKRRGRDPEMGGKPRRKNPQEGLYNELQKDKMAEAYSEIGMKGERRRGKGHDGLYQGLSTATKDTYDALHMQALPPR

SEQ ID NO: 7077 - protein, 378 aa, Artificial Sequence
  source: /note="Description of Artificial Sequence: Synthetic Chimeric Antigen Receptor"
MVLLWLTLLLIALPCLLQTKEDPNPPITNLRMKAKAQQLTWDLNRNVTDIECVKDADYSMPAVNNSYCQFGAISLCEVTNYTVRVANPPFSTWILFPENSGKPWAGAENLTCWIHDVDFLSCSWAVGPGAPADVQYDLYLNVANRRQQYECLHYKTDAQGTRIGCRFDDISRLSSGSQSSHILVRGRSAAFGIPCTDKFVVFSQIEILTPPNMTAKCNKTHSFMHWKMRSHFNRKFRYELQIQKRMQPVITEQVRDRTSFQLLNPGTYTVQIRARERVYEFLSAWSTPQRFECDQEEGANTRAWRTSLLIALGTLLALVCVFVICRRYLVMQRLFPRIPHMKDPIGDSFQNDKLVVWEAGKAGLEECLVTEVQVVQKT

SEQ ID NO: 7078 - protein, 1352 aa, Artificial Sequence
  source: /note="Description of Artificial Sequence: Synthetic Chimeric Antigen Receptor"
MSLPVTALLLPLALLLHAARPDIQMTQTTSSLSASLGDRVTISCRASQDISKYLNWYQQKPDGTVKLLIYHTSRLHSGVPSRFSGSGSGTDYSLTISNLEQEDIATYFCQQGNTLPYTFGGGTKLEITKAGGGGSGGGGSGGGGSGGGGSEVKLQESGPGLVAPSQSLSVTCTVSGVSLPDYGVSWIRQPPRKGLEWLGVIWGSETTYYNSALKSRLTIIKDNSKSQVFLKIVINSLQTDDTAIYYCAKHYYYGGSYAMDYWGQGTSVTVSSDPTTTPAPRPPTPAPTIASQPLSLRPEACRPAAGGAVHTRGLDFACDIFWVLVVVGGVLACYSLLVTVAFIIFWVRRVKFSRSADAPAYQQGQNQLYNELNLGRREEYDVLDKRRGRDPEMGGKPRRKNPQEGLYNELQKDKMAEAYSEIGMKGERRRGKGHDGLYQGLSTATKDTYDALHMQALPPRRAEGRGSLLTCGDVEENPGPMAVPTQVLGLLLLWLTDARCDIQMTQSPSSLSASVGDRVTITCRASEDIYFNLVWYQQKPGKAPKLLIYDTNRLADGVPSRFSGSGSGTQYTLTISSLQPEDFATYYCQHYKNYPLTFGQGTKLEIKRSGGGGSGGGGSGGGGSGGGGSRSEVQLVESGGGLVQPGGSLRLSCAASGFTLSNYGMHWIRQAPGKGLEWVSSISLNGGSTYYRDSVKGRFTISRDNAKSTLYLQMNSLRAEDTAVYYCAAQDAYTGGYFDYWGQGTLVTVSSMDPAEPKSPDKTHTCPPCPAPPVAGPSVFLFPPKPKDTLMIARTPEVTCVVVDVSHEDPEVKFNWYVDGVEVHNAKTKPREEQYNSTYRVVSVLTVLHQDWLNGKEYKCKVSNKALPAPIEKTISKAKGQPREPQVYTLPPSRDELTKNQVSLTCLVKGFYPSDIAVEWESNGQPENNYKTTPPVLDSDGSFFLYSKLTVDKSRWQQGNVFSCSVMHEALHNHYTQKSLSLSPGKKDPKAVFGCIFGALVIVTVGGFIFWRKKRKDAKNNEVSFSQIKPKKSKLIRVENFEAYFKKQQADSNCGFAEEYEDLKLVGISQPKYAAELAENRGKNRYNNVLPYDISRVKLSVQTHSTDDYINANYMPGYHSKKDFIATQGPLPNTLKDFWRMVWEKNVYAIIMLTKCVEQGRTKCEEYWPSKQAQDYGDITVAMTSEIVLPEWTIRDFTVKNIQTSESHPLRQFHFTSWPDHGVPDTTDLLINFRYLVRDYMKQSPPESPILVHCSAGVGRTGTFIAIDRLIYQIENENTVDVYGIVYDLRMHRPLMVQTEDQYVFLNQCVLDIVRSQKDSKVDLIYQNTTAMTIYENLAPVTTFGKTNGYIA

SEQ ID NO: 7079 - protein, 1341 aa, Artificial Sequence
  source: /note="Description of Artificial Sequence: Synthetic Chimeric Antigen Receptor"
MSLPVTALLLPLALLLHAARPDIQMTQTTSSLSASLGDRVTISCRASQDISKYLNWYQQKPDGTVKLLIYHTSRLHSGVPSRFSGSGSGTDYSLTISNLEQEDIATYFCQQGNTLPYTEGGGTKLEITKAGGGGSGGGGSGGGGSGGGGSEVKLQESGPGLVAPSQSLSVTCTVSGVSLPDYGVSWIRQPPRKGLEWLGVIWGSETTYYNSALKSRLTIIKDNSKSQVFLKMNSLQTDDTAIYYCAKHYYYGGSYAMDYWGQGTSVTVSSDPTTTPAPRPPTPAPTIASQPLSLRPEACRPAAGGAVHTRGLDFACDIFWVLVVVGGVLACYSLLVTVAFIIEWVRRVKFSRSADAPAYQQGQNQLYNELNLGRREEYDVLDKRRGRDPEMGGKPRRKNPQEGLYNELQKDKMAEAYSEIGMKGERRRGKGHDGLYQGLSTATKDTYDALHMQALPPRRAEGRGSLLTCGDVEENPGPMETDTLLLWVLLLWVPGSTGQVTLKESGPGILKPSQTLSLTCSFSGESLSTSGMGVGWIRQPSGKGLEWLAHIWWDDDVYYNPSLKNQLTISKDASRDQVFLKITNLDTADTATYYCVRRRATGTGEDYWGQGTTLTVSSGGGGSGGGGSGGGGSNIVMTQSHKFMSTSVGDRVSIACKASQDVGTAVAWYQQKPGQSPKLLIYWTSTRHTGVPDRFTGSGSGTDFTLTITNVQSEDLADYFCHQYNSYNTFGSGTRLELKRSDPAEPKSPDKTHTCPPCPAPPVAGPSVFLEPPKPKDTLMIARTPEVTCVVVDVSHEDPEVKFNWYVDGVEVHNAKTKPREEQYNSTYRVVSVLTVLHQDWLNGKEYKCKVSNKALPAPIEKTISKAKGQPREPQVYTLPPSRDELTKNQVSLTCLVKGFYPSDIAVEWESNGQPENNYKTTPPVLDSDGSFFLYSKLTVDKSRWQQGNVESCSVMHEALHNHYTQKSLSLSPGKKDPKAVFGCIFGALVIVTVGGFIFWRKKRKDAKNNEVSFSQIKPKKSKLIRVENFEAYFKKQQADSNCGFAEEYEDLKLVGISQPKYAAELAENRGKNRYNNVLPYDISRVKLSVQTHSTDDYINANYMPGYHSKKDFIATQGPLPNTLKDFWRMVWEKNVYAIIMLTKCVEQGRTKCEEYWPSKQAQDYGDITVAMTSEIVLPEWTIRDFTVKNIQTSESHPLRQFHFTSWPDHGVPDTTDLLINFRYLVRDYMKQSPPESPILVHCSAGVGRTGTFIAIDRLIYQIENENTVDVYGIVYDLRMHRPLMVQTEDQYVFLNQCVLDIVRSQKDSKVDLIYQNTTAMTIYENLAPVTTFGKTNGYIA

SEQ ID NO: 7080 - protein, 1342 aa, Artificial Sequence [sequence omitted]

SEQ ID NO: 7081 - protein, 1341 aa, Artificial Sequence
  source: /note="Description of Artificial Sequence: Synthetic Chimeric Antigen Receptor"
MSLPVTALLLPLALLLHAARPDIQMTQTTSSLSASLGDRVTISCRASQDISKYLNWYQQKPDGTVKLLIYHTSRLHSGVPSRFSGSGSGTDYSLTISNLEQEDIATYFCQQGNTLPYTEGGGTKLEITKAGGGGSGGGGSGGGGSGGGGSEVKLQESGPGLVAPSQSLSVTCTVSGVSLPDYGVSWIRQPPRKGLEWLGVIWGSETTYYNSALKSRLTIIKDNSKSQVFLKMNSLQTDDTAIYYCAKHYYYGGSYAMDYWGQGTSVTVSSDPTTTPAPRPPTPAPTIASQPLSLRPEACRPAAGGAVHTRGLDFACDIFWVLVVVGGVLACYSLLVTVAFIIFWVRRVKFSRSADAPAYQQGQNQLYNELNLGRREEYDVLDKRRGRDPEMGGKPRRKNPQEGLYNELQKDKMAEAYSEIGMKGERRRGKGHDGLYQGLSTATKDTYDALHMQALPPRRAEGRGSLLTCGDVEENPGPMETDTLLLWVLLLWVPGSTGQVQLQESGPGLVKPSQTLSITCTVSGFSLASYNIHWVRQPPGKGLEWLGVIWAGGSTNYNSALMSRLTISKDNSKNQVFLKMSSLTAADTAVYYCAKRSDDYSWFAYWGQGTLVTVSSGGGGSGGGGSGGGGSENQMTQSPSSLSASVGDRVTMTCRASSSVSSSYLHWYQQKSGKAPKVWIYSTSNLASGVPSRFSGSGSGTDYTLTISSLQPEDFATYYCQQYSGYPITEGQGTKVEIKRSDPAEPKSPDKTHTCPPCPAPPVAGPSVFLFPPKPKDTLMIARTPEVTCVVVDVSHEDPEVKFNWYVDGVEVHNAKTKPREEQYNSTYRVVSVLTVLHQDWLNGKEYKCKVSNKALPAPIEKTISKAKGQPREPQVYTLPPSRDELTKNQVSLTCLVKGFYPSDIAVEWESNGQPENNYKTTPPVLDSDGSFFLYSKLTVDKSRWQQGNVFSCSVMHEALHNHYTQKSLSLSPGKKDPKAVFGCIFGALVIVTVGGFIFWRKKRKDAKNNEVSFSQIKPKKSKLIRVENFEAYFKKQQADSNCGFAEEYEDLKLVGISQPKYAAELAENRGKNRYNNVLPYDISRVKLSVQTHSTDDYINANYMPGYHSKKDFIATQGPLPNTLKDFWRMVWEKNVYAIIMLTKCVEQGRTKCEEYWPSKQAQDYGDITVAMTSEIVLPEWTIRDFTVKNIQTSESHPLRQFHFTSWPDHGVPDTTDLLINFRYLVRDYMKQSPPESPILVHCSAGVGRTGTFIAIDRLIYQIENENTVDVYGIVYDLRMHRPLMVQTEDQYVFLNQCVLDIVRSQKDSKVDLIYQNTTAMTIYENLAPVTTEGKTNGYIA

SEQ ID NO: 7082 - protein, 1341 aa, Artificial Sequence [sequence omitted]

SEQ ID NO: 7083 - protein, 1113 aa, Artificial Sequence
  source: /note="Description of Artificial Sequence: Synthetic Chimeric Antigen Receptor"
MSLPVTALLLPLALLLHAARPDIQMTQTTSSLSASLGDRVTISCRASQDISKYLNWYQQKPDGTVKLLIYHTSRLHSGVPSRFSGSGSGTDYSLTISNLEQEDIATYFCQQGNTLPYTFGGGTKLEITKAGGGGSGGGGSGGGGSGGGGSEVKLQESGPGLVAPSQSLSVTCTVSGVSLPDYGVSWIRQPPRKGLEWLGVIWGSETTYYNSALKSRLTIIKDNSKSQVFLKMNSLQTDDTAIYYCAKHYYYGGSYAMDYWGQGTSVTVSSDPTTTPAPRPPTPAPTIASQPLSLRPEACRPAAGGAVHTRGLDFACDIFWVLVVVGGVLACYLLVTVAFIIFWVRRVKFSRSADAPAYQQGQNQLYNELNLGRREEYDVLDKRRGRDPEMGGKPRRKNPQEGLYNELQKDKMAEAYSEIGMKGERRRGKGHDGLYQGLSTATKDTYDALHMQALPPRRAEGRGSLLTCGDVEENPGPMAVPTQVLGLLLLWLTDARCDIQMTQSPSSLSASVGDRVTITCRASEDIYFNLVWYQQKPGKAPKLLIYDTNRLADGVPSRFSGSGSGTQYTLTISSLQPEDFATYYCQHYKNYPLTFGQGTKLEIKRSGGGGSGGGGSGGGGSGGGGSRSEVQLVESGGGLVQPGGSLRLSCAASGFTLSNYGMHWIRQAPGKGLEWVSSISLNGGSTYYRDSVKGRFTISRDNAKSTLYLQMNSLRAEDTAVYYCAAQDAYTGGYFDYWGQGTLVTVSSMDPATTTKPVLRTPSPVHPTGTSQPQRPEDCRPRGSVKGTGLDFACDIYWAPLAGICVALLLSLIITLICYHRSRKRVCKSGGGSFWEEFESLQKQEVKNLHQRLEGQRPENKGKNRYKNILPFDHSRVILQGRDSNIPGSDYINANYIKNQLLGPDENAKTYIASQGCLEATVNDFWQMAWQENSRVIVMTTREVEKGRNKCVPYWPEVGMQRAYGPYSVTNCGEHDTTEYKLRTLQVSPLDNGDLIREIWHYQYLSWPDHGVPSEPGGVLSFLDQINQRQESLPHAGPIIVHCSAGIGRIGTIIVIDMLMENISTKGLDCDIDIQKTIQMVRAQRSGMVQTEAQYKFIYVAIAQFIETTKKKL

SEQ ID NO: 7084 - protein, 918 aa, Artificial Sequence
  source: /note="Description of Artificial Sequence: Synthetic Chimeric Antigen Receptor"
MSLPVTALLLPLALLLHAARPDIQMTQTTSSLSASLGDRVTISCRASQDISKYLNWYQQKPDGTVKLLIYHTSRLHSGVPSRFSGSGSGTDYSLTISNLEQEDIATYFCQQGNTLPYTFGGGTKLEITKAGGGGSGGGGSGGGGSGGGGSEVKLQESGPGLVAPSQSLSVTCTVSGVSLPDYGVSWIRQPPRKGLEWLGVIWGSETTYYNSALKSRLTIIKDNSKSQVFLKMNSLQTDDTAIYYCAKHYYYGGSYAMDYWGQGTSVTVSSDPITTPAPRPPTPAPTIASQPLSLRPEACRPAAGGAVHTRGLDFACDIFWVLVVVGGVLACYSLLVTVAFIIFWVRRVKFSRSADAPAYQQGQNQLYNELNLGRREEYDVLDKRRGRDPEMGGKPRRKNPQEGLYNELQKDKMAEAYSEIGMKGERRRGKGHDGLYQGLSTATKDTYDALHMQALPPRRAEGRGSLLTCGDVEENPGPMAVPTQVLGLLLLWLTDARCDIQMTQSPSSLSASVGDRVTITCRASEDIYFNLVWYQQKPGKAPKLLIYDTNRLADGVPSRFSGSGSGTQYTLTISSLQPEDFATYYCQHYKNYPLTFGQGTKLEIKRSGGGGSGGGGSGGGGSGGGGSRSEVQLVESGGGLVQPGGSLRLSCAASGFTLSNYGMHWIRQAPGKGLEWVSSISLNGGSTYYRDSVKGRFTISRDNAKSTLYLQMNSLRAEDTAVYYCAAQDAYTGGYFDYWGQGTLVTVSSMDPATTTKPVLRTPSPVHPTGTSQPQRPEDCRPRGSVKGTGLDFACDILIGVSVVFLFCLLLLVLFCLHRQNQIKQGPPRSKDEEQKPQQRPDLAVDVLERTADKATVNGLPEKDRETDTSALAAGSSQEVTYAQLDHWALTQRTARAVSPQSTKPMAESITYAAVARH

SEQ ID NO: 7085 - protein, 1114 aa, Artificial Sequence
  source: /note="Description of Artificial Sequence: Synthetic Chimeric Antigen Receptor"
MSLPVTALLLPLALLLHAARPDIQMTQTTSSLSASLGDRVTISCRASQDISKYLNWYQQKPDGTVKLLIYHTSRLHSGVPSRFSGSGSGTDYSLTISNLEQEDIATYFCQQGNTLPYTFGGGTKLEITKAGGGGSGGGGSGGGGSGGGGSEVKLQESGPGLVAPSQSLSVTCTVSGVSLPDYGVSWIRQPPRKGLEWLGVIWGSETTYYNSALKSRLTIIKDNSKSQVFLKMNSLQTDDTAIYYCAKHYYYGGSYAMDYWGQGTSVTVSSDPTTTPAPRPPTPAPTIASQPLSLRPEACRPAAGGAVHTRGLDFACDIFWVLVVVGGVLACYSLLVTVAFIIFWVRRVKFSRSADAPAYQQGQNQLYNELNLGRREEYDVLDKRRGRDPEMGGKPRRKNPQEGLYNELQKDKMAEAYSEIGMKGERRRGKGHDGLYQGLSTATKDTYDALHMQALPPRRAEGRGSLLTCGDVEENPGPMAVPTQVLGLLLLWLTDARCDIQMTQSPSSLSASVGDRVTITCRASEDIYFNLVWYQQKPGKAPKLLIYDTNRLADGVPSRFSGSGSGTQYTLTISSLQPEDFATYYCQHYKNYPLTFGQGTKLEIKRSGGGGSGGGGSGGGGSGGGGSRSEVQLVESGGGLVQPGGSLRLSCAASGFTLSNYGMHWIRQAPGKGLEWVSSISLNGGSTYYRDSVKGRFTISRDNAKSTLYLQMNSLRAEDTAVYYCAAQDAYTGGYFDYWGQGTLVTVSSMDPATTTKPVLRTPSPVHPTGTSQPQRPEDCRPRGSVKGTGLDFACDIYWAPLAGICVALLLSLIITLICYHRSRKRVCKSGGGSFWEEFESLQKQEVKNLHQRLEGQRPENKGKNRYKNILPFDHSRVILQGRDSNIPGSDYINANYIKNQLLGPDENAKTYIASQGCLEATVNDFWQMAWQENSRVIVMTTREVEKGRNKCVPYWPEVGMQRAYGPYSVTNCGEHDTTEYKLRTLQVSPLDNGDLIREIWHYQYLSWPDHGVPSEPGGVLSFLDQINQRQESLPHAGPIIVHCSAGIGRTGTIIVIDMLMENISTKGLDCDIDIQKTIQMVRAQRSGMVQTEAQYKFIYVAIAQFIETTKKKL

SEQ ID NO: 7086 - protein, 918 aa, Artificial Sequence
  source: /note="Description of Artificial Sequence: Synthetic Chimeric Antigen Receptor"
MSLPVTALLLPLALLLHAARPDIQMTQTTSSLSASLGDRVTISCRASQDISKYLNWYQQKPDGTVKLLIYHTSRLHSGVPSRFSGSGSGTDYSLTISNLEQEDIATYFCQQGNTLPYTFGGGTKLEITKAGGGGSGGGGSGGGGSGGGGSEVKLQESGPGLVAPSQSLSVTCTVSGVSLPDYGVSWIRQPPRKGLEWLGVIWGSETTYYNSALKSRLTIIKDNSKSQVFLKMNSLQTDDTAIYYCAKHYYYGGSYAMDYWGQGTSVTVSSDPTTTPAPRPPTPAPTIASQPLSLRPEACRPAAGGAVHTRGLDFACDIFWVLVVVGGVLACYSLLVTVAFIIFWVRRVKFSRSADAPAYQQGQNQLYNELNLGRREEYDVLDKRRGRDPEMGGKPRRKNPQEGLYNELQKDKMAEAYSEIGMKGERRRGKGHDGLYQGLSTATKDTYDALHMQALPPRRAEGRGSLLTCGDVEENPGPMAVPTQVLGLLLLWLTDARCDIQMTQSPSSLSASVGDRVTITCRASEDIYFNLVWYQQKPGKAPKLLIYDTNRLADGVPSRFSGSGSGTQYTLTISSLQPEDFATYYCQHYKNYPLTFGQGTKLEIKRSGGGGSGGGGSGGGGSGGGGSRSEVQLVESGGGLVQPGGSLRLSCAASGFTLSNYGMHWIRQAPGKGLEWVSSISLNGGSTYYRDSVKGRFTISRDNAKSTLYLQMNSLRAEDTAVYYCAAQDAYTGGYFDYWGQGTLVTVSSMDPATTTKPVLRTPSPVHPTGTSQPQRPEDCRPRGSVKGTGLDFACDILIGVSVVFLFCLLLLVLFCLHRQNQIKQGPPRSKDEEQKPQQRPDLAVDVLERTADKATVNGLPEKDRETDTSALAAGSSQEVTYAQLDHWALTQRTARAVSPQSTKPMAESITYAAVARH

SEQ ID NO: 7087 - protein, 1362 aa, Artificial Sequence
  source: /note="Description of Artificial Sequence: Synthetic Chimeric Antigen Receptor"
MSLPVTALLLPLALLLHAARPDIQMTQTTSSLSASLGDRVTISCRASQDISKYLNWYQQKPDGTVKLLIYHTSRLHSGVPSRFSGSGSGTDYSLTISNLEQEDIATYFCQQGNTLPYTFGGGTKLEITKAGGGGSGGGGSGGGGSGGGGSEVKLQESGPGLVAPSQSLSVTCTVSGVSLPDYGVSWIRQPPRKGLEWLGVIWGSETTYYNSALKSRLTIIKDNSKSQVFLKMNSLQTDDTAIYYCAKHYYYGGSYAMDYWGQGTSVTVSSDPTTTPAPRPPTPAPTIASQPLSLRPEACRPAAGGAVHTRGLDFACDIFWVLVVVGGVLACYSLLVTVAFIIFWVRRVKFSRSADAPAYQQGQNQLYNELNLGRREEYDVLDKRRGRDPEMGGKPRRKNPQEGLYNELQKDKMAEAYSEIGMKGERRRGKGHDGLYQGLSTATKDTYDALHMQALPPRRAEGRGSLLTCGDVEENPGPMAVPTQVLGLLLLWLTDARCDIQMTQSPSSLSASVGDRVTITCRASEDIYFNLVWYQQKPGKAPKLLIYDTNRLADGVPSRFSGSGSGTQYTLTISSLQPEDFATYYCQHYKNYPLTFGQGTKLEIKRSGGGGSGGGGSGGGGSGGGGSRSEVQLVESGGGLVQPGGSLRLSCAASGFTLSNYGMHWIRQAPGKGLEWVSSISLNGGSTYYRDSVKGRFTISRDNAKSTLYLQMNSLRAEDTAVYYCAAQDAYTGGYFDYWGQGTLVTVSSMDPTTTKPVLRTPSPVHPTGTSQPQRPEDCRPRGSVKGTGLDFACDILIGVSVVFLFCLLLLVLFCLHRQNQIKQGPPRSKDEEQKPQQRPDLAVDVLERTADKATVNGLPEKDRETDTSALAAGSSQEVTYAQLDHWALTQRTARAVSPQSTKPMAESITYAAVARHRAEGRGSLLTCGDVEENPGPWYHGHMSGGQAETLLQAKGEPWTFLVRESLSQPGDFVLSVLSDQPKAGPGSPLRVTHIKVMCEGGRYTVGGLETFDSLTDLVEHFKKTGIEEASGAFVYLRQPYSGGGGSFEAYFKKQQADSNCGFAEEYEDLKLVGISQPKYAAELAENRGKNRYNNVLPYDISRVKLSVQTHSTDDYINANYMPGYHSKKDFIATQGPLPNTLKDFWRMVWEKNVYAIIMLTKCVEQGRTKCEEYWPSKQAQDYGDITVAMTSEIVLPEWTIRDFTVKNIQTSESHPLRQFHFTSWPDHGVPDTTDLLINFRYLVRDYMKQSPPESPILVHCSAGVGRTGTFIAIDRLIYQIENENTVDVYGIVYDLRMHRPLMVQTEDQYVFLNQCVLDIVRSQKDSKVDLIYQNTTAMTIYENLAPVTTFGKTNGYIASGS

SEQ ID NO: 7088 - protein, 1129 aa, Artificial Sequence [sequence omitted]

SEQ ID NO: 7089 - protein, 487 aa, Artificial Sequence
  source: /note="Description of Artificial Sequence: Synthetic Chimeric Antigen Receptor"
MGTSLLCWMALCLLGADHADAQVQLQQSGPELVKPGASVKISCKASGYAFSSSWMNWVKQRPGKGLEWIGRIYPGDEDTNYSGKFKDKATLTADKSSTTAYMQLSSLTSEDSAVYFCARSLLYGDYLDYWGQGTTLTVSSGGGGSGGGGSGGGGSQIVLTQSPAIMSASPGEKVTMTCSASSSVSYMHWYQQKSGTSPKRWIYDTSKLASGVPDRFSGSGSGTSYFLTINNMEAEDAATYYCQQWNINPLTFGAGTKLELKRSDPTTTPAPRPPTPAPTIASQPLSLRPEACRPAAGGAVHTRGLDFACDIYIWAPLAGTCGVLLLSLVITLYCRSKRSRLLHSDYMNMTPRRPGPTRKHYQPYAPPRDFAAYRSRVKFSRSADAPAYQQGQNQLYNELNLGRREEYDVLDKRRGRDPEMGGKPRRKNPQEGLYNELQKDKMAEAYSEIGMKGERRRGKGHDGLYQGLSTATKDTYDALHMQALPPR

SEQ ID NO: 7090 - protein, 483 aa, Artificial Sequence
  source: /note="Description of Artificial Sequence: Synthetic Chimeric Antigen Receptor"
MGTSLLCWMALCLLGADHADAQVQLQQSGPELVKPGASVKISCKASGYAFSSSWMNWVKQRPGKGLEWIGRIYPGDEDTNYSGKFKDKATLTADKSSTTAYMQLSSLTSEDSAVYFCARSLLYGDYLDYWGQGTTLTVSSGGGGSGGGGSGGGGSQIVLTQSPAIMSASPGEKVTMTCSASSSVSYMHWYQQKSGTSPKRWIYDTSKLASGVPDRFSGSGSGTSYFLTINNMEAEDAATYYCQQWNINPLTFGAGTKLELKRSDPTTTPAPRPPTPAPTIASQPLSLRPEACRPAAGGAVHTRGLDFACDIYIWAPLAGTCGVLLLSLVITLYCRRDQRLPPDAHKPPGGGSFRTPIQEEQADAHSTLAKIRVKFSRSADAPAYQQGQNQLYNELNLGRREEYDVLDKRRGRDPEMGGKPRRKNPQEGLYNELQKDKMAEAYSEIGMKGERRRGKGHDGLYQGLSTATKDTYDALHMQALPPR

SEQ ID NO: 7091 - protein, 488 aa, Artificial Sequence
  source: /note="Description of Artificial Sequence: Synthetic Chimeric Antigen Receptor"
MGTSLLCWMALCLLGADHADAQVQLQQSGPELVKPGASVKISCKASGYAFSSSWMNWVKQRPGKGLEWIGRIYPGDEDTNYSGKFKDKATLTADKSSTTAYMQLSSLTSEDSAVYFCARSLLYGDYLDYWGQGTTLTVSSGGGGSGGGGSGGGGSQIVLTQSPAIMSASPGEKVTMTCSASSSVSYMHWYQQKSGTSPKRWIYDTSKLASGVPDRFSGSGSGTSYFLTINNMEAEDAATYYCQQWNINPLTFGAGTKLELKRSDPTTTPAPRPPTPAPTIASQPLSLRPEACRPAAGGAVHTRGLDFACDIYIWAPLAGTCGVLLLSLVITLYCKRGRKKLLYIFKQPFMRPVQTTQEEDGCSCRFPEEEEGGCELRVKFSRSADAPAYQQGQNQLYNELNLGRREEYDVLDKRRGRDPEMGGKPRRKNPQEGLYNELQKDKMAEAYSEIGMKGERRRGKGHDGLYQGLSTATKDTYDALHMQALPPR

SEQ ID NO: 7092 - protein, 527 aa, Artificial Sequence
  source: /note="Description of Artificial Sequence: Synthetic Chimeric Antigen Receptor"
MGTSLLCWMALCLLGADHADAQVQLQQSGPELVKPGASVKISCKASGYAFSSSWMNWVKQRPGKGLEWIGRIYPGDEDTNYSGKFKDKATLTADKSSTTAYMQLSSLTSEDSAVYFCARSLLYGDYLDYWGQGTTLTVSSGGGGSGGGGSGGGGSQIVLTQSPAIMSASPGEKVTMTCSASSSVSYMHWYQQKSGTSPKRWIYDTSKLASGVPDRFSGSGSGTSYFLTINNMEAEDAATYYCQQWNINPLTFGAGTKLELKRSDPTTTPAPRPPTPAPTIASQPLSLRPEACRPAAGGAVHTRGLDFACDIFWVLVVVGGVLACYSLLVTVAFIIFWVRSKRSRLLHSDYMNMTPRRPGPTRKHYQPYAPPRDFAAYRSRDQRLPPDAHKPPGGGSFRTPIQEEQADAHSTLAKIRVKFSRSADAPAYQQGQNQLYNELNLGRREEYDVLDKRRGRDPEMGGKPRRKNPQEGLYNELQKDKMAEAYSEIGMKGERRRGKGHDGLYQGLSTATKDTYDALHMQALPPR

SEQ ID NO: 7093 - protein, 484 aa, Artificial Sequence
  source: /note="Description of Artificial Sequence: Synthetic Chimeric Antigen Receptor"
MGWSWIFLFLVSGTGGVLSEVQLQQSGPELVKPGASVKMSCKASGYTFTDYYMKWVKQSHGKSLEWIGDIIPSNGATFYNQKFKGKATLTVDRSSSTAYMHLNSLTSEDSAVYYCTRSHLLRASWFAYWGQGTLVTVSAASGGGGSGGGGSGGGGSMESQTQVLMSLLFWVSGTCGDFVMTQSPSSLTVTAGEKVTMSCKSSQSLLNSGNQKNYLTWYLQKPGQPPKLLIYWASTRESGVPDRFTGSGSGTDFTLTISSVQAEDLAVYYCQNDYSYPYTFGGGTKLEIKRGLAVSTISSFFPPGYQIYIWAPLAGTCGVLLLSLVITLYCKRGRKKLLYIFKQPFMRPVQTTQEEDGCSCRFPEEEEGGCELRVKFSRSADAPAYQQGQNQLYNELNLGRREEYDVLDKRRGRDPEMGGKPRRKNPQEGLYNELQKDKMAEAYSEIGMKGERRRGKGHDGLYQGLSTATKDTYDALHMQALPPR

SEQ ID NO: 7094 - protein, 487 aa, Artificial Sequence
  source: /note="Description of Artificial Sequence: Synthetic Chimeric Antigen Receptor"
MGWSWIFLFLVSGTGGVLSEVQLQQSGPELVKPGASVKMSCKASGYTFTDYYMKWVKQSHGKSLEWIGDIIPSNGATFYNQKFKGKATLTVDRSSSTAYMHLNSLTSEDSAVYYCTRSHLLRASWFAYWGQGTLVTVSAASGGGGSGGGGSGGGGSMESQTQVLMSLLFWVSGTCGDFVMTQSPSSLTVTAGEKVTMSCKSSQSLLNSGNQKNYLTWYLQKPGQPPKLLIYWASTRESGVPDRFTGSGSGTDFTLTISSVQAEDLAVYYCQNDYSYPYTFGGGTKLEIKRGLAVSTISSFFPPGYQIISFFLALTSTALLFLLFFLTLRFSVVKRGRKKLLYIFKQPFMRPVQTTQEEDGCSCRFPEEEEGGCELRVKFSRSADAPAYQQGQNQLYNELNLGRREEYDVLDKRRGRDPEMGGKPRRKNPQEGLYNELQKDKMAEAYSEIGMKGERRRGKGHDGLYQGLSTATKDTYDALHMQALPPR

SEQ ID NO: 7095 - protein, 513 aa, Artificial Sequence
  source: /note="Description of Artificial Sequence: Synthetic Chimeric Antigen Receptor"
MGWSWIFLFLVSGTGGVLSEVQLQQSGPELVKPGASVKMSCKASGYTFTDYYMKWVKQSHGKSLEWIGDIIPSNGATFYNQKFKGKATLTVDRSSSTAYMHLNSLTSEDSAVYYCTRSHLLRASWFAYWGQGTLVTVSAASGGGGSGGGGSGGGGSMESQTQVLMSLLFWVSGTCGDFVMTQSPSSLTVTAGEKVTMSCKSSQSLLNSGNQKNYLTWYLQKPGQPPKLLIYWASTRESGVPDRFTGSGSGTDFTLTISSVQAEDLAVYYCQNDYSYPYTFGGGTKLEIKRTTTPAPRPPTPAPTIASQPLSLRPEACRPAAGGAVHTRGLDFACDIYIWAPLAGTCGVLLLSLVITLYCKRGRKKLLYIFKQPFMRPVQTTQEEDGCSCRFPEEEEGGCELRVKFSRSADAPAYQQGQNQLYNELNLGRREEYDVLDKRRGRDPEMGGKPRRKNPQEGLYNELQKDKMAEAYSEIGMKGERRRGKGHDGLYQGLSTATKDTYDALHMQALPPR

SEQ ID NO: 7096 - protein, 516 aa, Artificial Sequence
  source: /note="Description of Artificial Sequence: Synthetic Chimeric Antigen Receptor"
MGWSWIFLFLVSGTGGVLSEVQLQQSGPELVKPGASVKMSCKASGYTFTDYYMKWVKQSHGKSLEWIGDIIPSNGATFYNQKFKGKATLTVDRSSSTAYMHLNSLTSEDSAVYYCTRSHLLRASWFAYWGQGTLVTVSAASGGGGSGGGGSGGGGSMESQTQVLMSLLFWVSGTCGDFVMTQSPSSLTVTAGEKVTMSCKSSQSLLNSGNQKNYLTWYLQKPGQPPKLLIYWASTRESGVPDRFTGSGSGTDFTLTISSVQAEDLAVYYCQNDYSYPYTFGGGTKLEIKRTTTPAPRPPTPAPTIASQPLSLRPEACRPAAGGAVHTRGLDFACDIISFFLALTSTALLFLLFFLTLRFSVVKRGRKKLLYIFKQPFMRPVQTTQEEDGCSCRFPEEEEGGCELRVKFSRSADAPAYQQGQNQLYNELNLGRREEYDVLDKRRGRDPEMGGKPRRKNPQEGLYNELQKDKMAEAYSEIGMKGERRRGKGHDGLYQGLSTATKDTYDALHMQALPPR

SEQ ID NO: 7097 - protein, 699 aa, Artificial Sequence
  source: /note="Description of Artificial Sequence: Synthetic Chimeric Antigen Receptor"
MGWSWIFLFLVSGTGGVLSEVQLQQSGPELVKPGASVKMSCKASGYTFTDYYMKWVKQSHGKSLEWIGDIIPSNGATFYNQKFKGKATLTVDRSSSTAYMHLNSLTSEDSAVYYCTRSHLLRASWFAYWGQGTLVTVSAASGGGGSGGGGSGGGGSMESQTQVLMSLLFWVSGTCGDFVMTQSPSSLTVTAGEKVTMSCKSSQSLLNSGNQKNYLTWYLQKPGQPPKLLIYWASTRESGVPDRFTGSGSGTDFTLTISSVQAEDLAVYYCQNDYSYPYTFGGGTKLEIKREPKSPDKTHTCPPCPAPPVAGPSVFLFPPKPKDTLMIARTPEVTCVVVDVSHEDPEVKFNWYVDGVEVHNAKTKPREEQYNSTYRVVSVLTVLHQDWLNGKEYKCKVSNKALPAPIEKTISKAKGQPREPQVYTLPPSRDELTKNQVSLTCLVKGFYPSDIAVEWESNGQPENNYKTTPPVLDSDGSFFLYSKLTVDKSRWQQGNVFSCSVMHEALHNHYTQKSLSLSPGKIYIWAPLAGTCGVLLLSLVITLYCKRGRKKLLYIFKQPFMRPVQTTQEEDGCSCRFPEEEEGGCELRVKFSRSADAPAYQQGQNQLYNELNLGRREEYDVLDKRRGRDPEMGGKPRRKNPQEGLYNELQKDKMAEAYSEIGMKGERRRGKGHDGLYQGLSTATKDTYDALHMQALPPR

SEQ ID NO: 7098 - protein, 702 aa, Artificial Sequence
  source: /note="Description of Artificial Sequence: Synthetic Chimeric Antigen Receptor"
MGWSWIFLFLVSGTGGVLSEVQLQQSGPELVKPGASVKMSCKASGYTFTDYYMKWVKQSHGKSLEWIGDIIPSNGATFYNQKFKGKATLTVDRSSSTAYMHLNSLTSEDSAVYYCTRSHLLRASWFAYWGQGTLVTVSAASGGGGSGGGGSGGGGSMESQTQVLMSLLFWVSGTCGDFVMTQSPSSLTVTAGEKVTMSCKSSQSLLNSGNQKNYLTWYLQKPGQPPKLLIYWASTRESGVPDRFTGSGSGTDFTLTISSVQAEDLAVYYCQNDYSYPYTFGGGTKLEIKREPKSPDKTHTCPPCPAPPVAGPSVFLFPPKPKDTLMIARTPEVTCVVVDVSHEDPEVKFNWYVDGVEVHNAKTKPREEQYNSTYRVVSVLTVLHQDWLNGKEYKCKVSNKALPAPIEKTISKAKGQPREPQVYTLPPSRDELTKNQVSLTCLVKGFYPSDIAVEWESNGQPENNYKTTPPVLDSDGSFFLYSKLTVDKSRWQQGNVFSCSVMHEALHNHYTQKSLSLSPGKIISFFLALTSTALLFLLFFLTLRFSVVKRGRKKLLYIFKQPFMRPVQTTQEEDGCSCRFPEEEEGGCELRVKFSRSADAPAYQQGQNQLYNELNLGRREEYDVLDKRRGRDPEMGGKPRRKNPQEGLYNELQKDKMAEAYSEIGMKGERRRGKGHDGLYQGLSTATKDTYDALHMQALPPR

SEQ ID NO: 7099 - protein, 510 aa, Artificial Sequence
  source: /note="Description of Artificial Sequence: Synthetic Chimeric Antigen Receptor"
WTWRFLFVVAAATGVQSQVQLLQSGAEVKKPGSSVKVSCKASGGTFSTYAISWVRQAPGQGLEWMGGIIPIFGIVNYAQKFQGRVTITADESTSTAYMELSSLRSEDTAVYYCARGGGSGPDVLDIWGQGTMVTVSSASTGGGGSGGGGSGGGGSMDMRVPAQLLGLLLLWLPGARCVIWMTQSPSLLSASTGDRVTISCRMSQGIRSYLAWYQQKPGKAPELLIYAASTLQSGVPSRFSGSGSGTDFTLTISSLQSEDFATYYCQQYYSFPYTFGQGTKLEIKRTVTTTPAPRPPTPAPTIASQPLSLRPEACRPAAGGAVHTRGLDFACDIYIWAPLAGTCGVLLLSLVITLYCKRGRKKLLYIFKQPFMRPVQTTQEEDGCSCRFPEEEEGGCELRVKFSRSADAPAYQQGQNQLYNELNLGRREEYDVLDKRRGRDPEMGGKPRRKNPQEGLYNELQKDKMAEAYSEIGMKGERRRGKGHDGLYQGLSTATKDTYDALHMQALPPR

SEQ ID NO: 7100 - protein, 431 aa, Artificial Sequence
  source: /note="Description of Artificial Sequence: Synthetic Chimeric Antigen Receptor"
QVQLQQPGAELVRPGASVKLSCKASGYTFTSYWMNWVKQRPDQGLEWIGRIDPYDSETHYNQKFKDKAILTVDKSSSTAYMQLSSLTSEDSAVYYCARGNWDDYWGQGTTLTVSSGGGGSGGGGSGGGGSDVQITQSPSYLAASPGETITINCRASKSISKDLAWYQEKPGKTNKLLIYSGSTLQSGIPSRFSGSGSGTDFTLTISSLEPEDFAMYYCQQHNKYPYTFGGGTKLEIKGLAVSTISSFFPPGYQIYIWAPLAGTCGVLLLSLVITLYCKRGRKKLLYIFKQPFMRPVQTTQEEDGCSCRFPEEEEGGCELRVKFSRSADAPAYQQGQNQLYNELNLGRREEYDVLDKRRGRDPEMGGKPRRKNPQEGLYNELQKDKMAEAYSEIGMKGERRRGKGHDGLYQGLSTATKDTYDALHMQALPPR

SEQ ID NO: 7101 - protein, 434 aa, Artificial Sequence
  source: /note="Description of Artificial Sequence: Synthetic Chimeric Antigen Receptor"
QVQLQQPGAELVRPGASVKLSCKASGYTFTSYWMNWVKQRPDQGLEWIGRIDPYDSETHYNQKFKDKAILTVDKSSSTAYMQLSSLTSEDSAVYYCARGNWDDYWGQGTTLTVSSGGGGSGGGGSGGGGSDVQITQSPSYLAASPGETITINCRASKSISKDLAWYQEKPGKTNKLLIYSGSTLQSGIPSRFSGSGSGTDFTLTISSLEPEDFAMYYCQQHNKYPYTFGGGTKLEIKGLAVSTISSFFPPGYQIISFFLALTSTALLFLLFFLTLRFSVVKRGRKKLLYIFKQPFMRPVQTTQEEDGCSCRFPEEEEGGCELRVKFSRSADAPAYQQGQNQLYNELNLGRREEYDVLDKRRGRDPEMGGKPRRKNPQEGLYNELQKDKMAEAYSEIGMKGERRRGKGHDGLYQGLSTATKDTYDALHMQALPPR

SEQ ID NO: 7102 - protein, 460 aa, Artificial Sequence
  source: /note="Description of Artificial Sequence: Synthetic Chimeric Antigen Receptor"
QVQLQQPGAELVRPGASVKLSCKASGYTFTSYWMNWVKQRPDQGLEWIGRIDPYDSETHYNQKFKDKAILTVDKSSSTAYMQLSSLTSEDSAVYYCARGNWDDYWGQGTTLTVSSGGGGSGGGGSGGGGSDVQITQSPSYLAASPGETITINCRASKSISKDLAWYQEKPGKTNKLLIYSGSTLQSGIPSRFSGSGSGTDFTLTISSLEPEDFAMYYCQQHNKYPYTFGGGTKLEIKTTTPAPRPPTPAPTIASQPLSLRPEACRPAAGGAVHTRGLDFACDIYIWAPLAGTCGVLLLSLVITLYCKRGRKKLLYIFKQPFMRPVQTTQEEDGCSCRFPEEEEGGCELRVKFSRSADAPAYQQGQNQLYNELNLGRREEYDVLDKRRGRDPEMGGKPRRKNPQEGLYNELQKDKMAEAYSEIGMKGERRRGKGHDGLYQGLSTATKDTYDALHMQALPPR

SEQ ID NO: 7103 - protein, 463 aa, Artificial Sequence
  source: /note="Description of Artificial Sequence: Synthetic Chimeric Antigen Receptor"
QVQLQQPGAELVRPGASVKLSCKASGYTFTSYWMNWVKQRPDQGLEWIGRIDPYDSETHYNQKFKDKAILTVDKSSSTAYMQLSSLTSEDSAVYYCARGNWDDYWGQGTTLTVSSGGGGSGGGGSGGGGSDVQITQSPSYLAASPGETITINCRASKSISKDLAWYQEKPGKTNKLLIYSGSTLQSGIPSRFSGSGSGTDFTLTISSLEPEDFAMYYCQQHNKYPYTFGGGTKLEIKTTTPAPRPPTPAPTIASQPLSLRPEACRPAAGGAVHTRGLDFACDIISFFLALTSTALLFLLFFLTLRFSVVKRGRKKLLYIFKQPFMRPVQTTQEEDGCSCRFPEEEEGGCELRVKFSRSADAPAYQQGQNQLYNELNLGRREEYDVLDKRRGRDPEMGGKPRRKNPQEGLYNELQKDKMAEAYSEIGMKGERRRGKGHDGLYQGLSTATKDTYDALHMQALPPR

SEQ ID NO: 7104 - protein, 646 aa, Artificial Sequence
  source: /note="Description of Artificial Sequence: Synthetic Chimeric Antigen Receptor"
QVQLQQPGAELVRPGASVKLSCKASGYTFTSYWMNWVKQRPDQGLEWIGRIDPYDSETHYNQKFKDKAILTVDKSSSTAYMQLSSLTSEDSAVYYCARGNWDDYWGQGTTLTVSSGGGGSGGGGSGGGGSDVQITQSPSYLAASPGETITINCRASKSISKDLAWYQEKPGKTNKLLIYSGSTLQSGIPSRFSGSGSGTDFTLTISSLEPEDFAMYYCQQHNKYPYTFGGGTKLEIKEPKSPDKTHTCPPCPAPPVAGPSVFLFPPKPKDTLMIARTPEVTCVVVDVSHEDPEVKFNWYVDGVEVHNAKTKPREEQYNSTYRVVSVLTVLHQDWLNGKEYKCKVSNKALPAPIEKTISKAKGQPREPQVYTLPPSRDELTKNQVSLTCLVKGFYPSDIAVEWESNGQPENNYKTTPPVLDSDGSFFLYSKLTVDKSRWQQGNVFSCSVMHEALHNHYTQKSLSLSPGKIYIWAPLAGTCGVLLLSLVITLYCKRGRKKLLYIFKQPFMRPVQTTQEEDGCSCRFPEEEEGGCELRVKFSRSADAPAYQQGQNQLYNELNLGRREEYDVLDKRRGRDPEMGGKPRRKNPQEGLYNELQKDKMAEAYSEIGMKGERRRGKGHDGLYQGLSTATKDTYDALHMQALPPR

SEQ ID NO: 7105 - protein, 649 aa, Artificial Sequence
  source: /note="Description of Artificial Sequence: Synthetic Chimeric Antigen Receptor"
QVQLQQPGAELVRPGASVKLSCKASGYTFTSYWMNWVKQRPDQGLEWIGRIDPYDSETHYNQKFKDKAILTVDKSSSTAYMQLSSLTSEDSAVYYCARGNWDDYWGQGTTLTVSSGGGGSGGGGSGGGGSDVQITQSPSYLAASPGETITINCRASKSISKDLAWYQEKPGKTNKLLIYSGSTLQSGIPSRFSGSGSGTDFTLTISSLEPEDFAMYYCQQHNKYPYTFGGGTKLEIKEPKSPDKTHTCPPCPAPPVAGPSVFLFPPKPKDTLMIARTPEVTCVVVDVSHEDPEVKFNWYVDGVEVHNAKTKPREEQYNSTYRVVSVLTVLHQDWLNGKEYKCKVSNKALPAPIEKTISKAKGQPREPQVYTLPPSRDELTKNQVSLTCLVKGFYPSDIAVEWESNGQPENNYKTTPPVLDSDGSFFLYSKLTVDKSRWQQGNVFSCSVMHEALHNHYTQKSLSLSPGKIISFFLALTSTALLFLLFFLTLRFSVVKRGRKKLLYIFKQPFMRPVQTTQEEDGCSCRFPEEEEGGCELRVKFSRSADAPAYQQGQNQLYNELNLGRREEYDVLDKRRGRDPEMGGKPRRKNPQEGLYNELQKDKMAEAYSEIGMKGERRRGKGHDGLYQGLSTATKDTYDALHMQALPPR

SEQ ID NO: 7106 - protein, 438 aa, Artificial Sequence
  source: /note="Description of Artificial Sequence: Synthetic Chimeric Antigen Receptor"
QIQLVQSGPELKKPGETVKISCKASGYIFTNYGMNWVKQAPGKSFKWMGWINTYTGESTYSADFKGRFAFSLETSASTAYLHINDLKNEDTATYFCARSGGYDPMDYWGQGTSVTVSSGGGGSGGGGSGGGGSDIVLTQSPASLAVSLGQRATISCRASESVDNYGNTFMHWYQQKPGQPPKLLIYRASNLESGIPARFSGSGSRTDFTLTINPVEADDVATYYCQQSNEDPPTFGAGTKLELKGLAVSTISSFFPPGYQIYIWAPLAGTCGVLLLSLVITLYCKRGRKKLLYIFKQPFMRPVQTTQEEDGCSCRFPEEEEGGCELRVKFSRSADAPAYQQGQNQLYNELNLGRREEYDVLDKRRGRDPEMGGKPRRKNPQEGLYNELQKDKMAEAYSEIGMKGERRRGKGHDGLYQGLSTATKDTYDALHMQALPPR

SEQ ID NO: 7107 - protein, 441 aa, Artificial Sequence
  source: /note="Description of Artificial Sequence: Synthetic Chimeric Antigen Receptor"
QIQLVQSGPELKKPGETVKISCKASGYIFTNYGMNWVKQAPGKSFKWMGWINTYTGESTYSADFKGRFAFSLETSASTAYLHINDLKNEDTATYFCARSGGYDPMDYWGQGTSVTVSSGGGGSGGGGSGGGGSDIVLTQSPASLAVSLGQRATISCRASESVDNYGNTFMHWYQQKPGQPPKLLIYRASNLESGIPARFSGSGSRTDFTLTINPVEADDVATYYCQQSNEDPPTFGAGTKLELKGLAVSTISSFFPPGYQIISFFLALTSTALLFLLFFLTLRFSVVKRGRKKLLYIFKQPFMRPVQTTQEEDGCSCRFPEEEEGGCELRVKFSRSADAPAYQQGQNQLYNELNLGRREEYDVLDKRRGRDPEMGGKPRRKNPQEGLYNELQKDKMAEAYSEIGMKGERRRGKGHDGLYQGLSTATKDTYDALHMQALPPR

SEQ ID NO: 7108 - protein, 467 aa, Artificial Sequence
  source: /note="Description of Artificial Sequence: Synthetic Chimeric Antigen Receptor"
QIQLVQSGPELKKPGETVKISCKASGYIFTNYGMNWVKQAPGKSFKWMGWINTYTGESTYSADFKGRFAFSLETSASTAYLHINDLKNEDTATYFCARSGGYDPMDYWGQGTSVTVSSGGGGSGGGGSGGGGSDIVLTQSPASLAVSLGQRATISCRASESVDNYGNTFMHWYQQKPGQPPKLLIYRASNLESGIPARFSGSGSRTDFTLTINPVEADDVATYYCQQSNEDPPTFGAGTKLELKTTTPAPRPPTPAPTIASQPLSLRPEACRPAAGGAVHTRGLDFACDIYIWAPLAGTCGVLLLSLVITLYCKRGRKKLLYIFKQPFMRPVQTTQEEDGCSCRFPEEEEGGCELRVKFSRSADAPAYQQGQNQLYNELNLGRREEYDVLDKRRGRDPEMGGKPRRKNPQEGLYNELQKDKMAEAYSEIGMKGERRRGKGHDGLYQGLSTATKDTYDALHMQALPPR

SEQ ID NO: 7109 - protein, 470 aa, Artificial Sequence
  source: /note="Description of Artificial Sequence: Synthetic Chimeric Antigen Receptor"
QIQLVQSGPELKKPGETVKISCKASGYIFTNYGMNWVKQAPGKSFKWMGWINTYTGESTYSADFKGRFAFSLETSASTAYLHINDLKNEDTATYFCARSGGYDPMDYWGQGTSVTVSSGGGGSGGGGSGGGGSDIVLTQSPASLAVSLGQRATISCRASESVDNYGNTFMHWYQQKPGQPPKLLIYRASNLESGIPARFSGSGSRTDFTLTINPVEADDVATYYCQQSNEDPPTFGAGTKLELKTTTPAPRPPTPAPTIASQPLSLRPEACRPAAGGAVHTRGLDFACDIISFFLALTSTALLFLLFFLTLRFSVVKRGRKKLLYIFKQPFMRPVQTTQEEDGCSCRFPEEEEGGCELRVKFSRSADAPAYQQGQNQLYNELNLGRREEYDVLDKRRGRDPEMGGKPRRKNPQEGLYNELQKDKMAEAYSEIGMKGERRRGKGHDGLYQGLSTATKDTYDALHMQALPPR

SEQ ID NO: 7110 - protein, 653 aa, Artificial Sequence
  source: /note="Description of Artificial Sequence: Synthetic Chimeric Antigen Receptor"
QIQLVQSGPELKKPGETVKISCKASGYIFTNYGMNWVKQAPGKSFKWMGWINTYTGESTYSADFKGRFAFSLETSASTAYLHINDLKNEDTATYFCARSGGYDPMDYWGQGTSVTVSSGGGGSGGGGSGGGGSDIVLTQSPASLAVSLGQRATISCRASESVDNYGNTFMHWYQQKPGQPPKLLIYRASNLESGIPARFSGSGSRTDFTLTINPVEADDVATYYCQQSNEDPPTFGAGTKLELKEPKSPDKTHTCPPCPAPPVAGPSVFLFPPKPKDTLMIARTPEVTCVVVDVSHEDPEVKFNWYVDGVEVHNAKTKPREEQYNSTYRVVSVLTVLHQDWLNGKEYKCKVSNKALPAPIEKTISKAKGQPREPQVYTLPPSRDELTKNQVSLTCLVKGFYPSDIAVEWESNGQPENNYKTTPPVLDSDGSFFLYSKLTVDKSRWQQGNVFSCSVMHEALHNHYTQKSLSLSPGKIYIWAPLAGTCGVLLLSLVITLYCKRGRKKLLYIFKQPFMRPVQTTQEEDGCSCRFPEEEEGGCELRVKFSRSADAPAYQQGQNQLYNELNLGRREEYDVLDKRRGRDPEMGGKPRRKNPQEGLYNELQKDKMAEAYSEIGMKGERRRGKGHDGLYQGLSTATKDTYDALHMQALPPR

SEQ ID NO: 7111 - protein, 656 aa, Artificial Sequence
  source: /note="Description of Artificial Sequence: Synthetic Chimeric Antigen Receptor"
QIQLVQSGPELKKPGETVKISCKASGYIFTNYGMNWVKQAPGKSFKWMGWINTYTGESTYSADFKGRFAFSLETSASTAYLHINDLKNEDTATYFCARSGGYDPMDYWGQGTSVTVSSGGGGSGGGGSGGGGSDIVLTQSPASLAVSLGQRATISCRASESVDNYGNTFMHWYQQKPGQPPKLLIYRASNLESGIPARFSGSGSRTDFTLTINPVEADDVATYYCQQSNEDPPTFGAGTKLELKEPKSPDKTHTCPPCPAPPVAGPSVFLFPPKPKDTLMIARTPEVTCVVVDVSHEDPEVKFNWYVDGVEVHNAKTKPREEQYNSTYRVVSVLTVLHQDWLNGKEYKCKVSNKALPAPIEKTISKAKGQPREPQVYTLPPSRDELTKNQVSLTCLVKGFYPSDIAVEWESNGQPENNYKTTPPVLDSDGSFFLYSKLTVDKSRWQQGNVFSCSVMHEALHNHYTQKSLSLSPGKIISFFLALTSTALLFLLFFLTLRFSVVKRGRKKLLYIFKQPFMRPVQTTQEEDGCSCRFPEEEEGGCELRVKFSRSADAPAYQQGQNQLYNELNLGRREEYDVLDKRRGRDPEMGGKPRRKNPQEGLYNELQKDKMAEAYSEIGMKGERRRGKGHDGLYQGLSTATKDTYDALHMQALPPR

SEQ ID NO: 7112 - protein, 449 aa, Artificial Sequence; identical to SEQ ID NO: 7038
  source: /note="Description of Artificial Sequence: Synthetic Chimeric Antigen Receptor"

SEQ ID NO: 7113 - protein, 452 aa, Artificial Sequence
  source: /note="Description of Artificial Sequence: Synthetic Chimeric Antigen Receptor"
EVKLVESGGGLVQPGGSLSLSCAASGFTFTDYYMSWVRQPPGKALEWLALIRSKADGYTTEYSASVKGRFTLSRDDSQSILYLQMNALRPEDSATYYCARDAAYYSYYSPEGAMDYWGQGTSVTVSSGGGGSGGGGSGGGGSMADYKDIVMTQSHKFMSTSVGDRVNITCKASQNVDSAVAWYQQKPGQSPKALIYSASYRYSGVPDRFTGRGSGTDFTLTISSVQAEDLAVYYCQQYYSTPWTFGGGTKLEIKRGLAVSTISSFFPPGYQIISFFLALTSTALLFLLFFLTLRFSVVKRGRKKLLYIFKQPFMRPVQTTQEEDGCSCRFPEEEEGGCELRVKFSRSADAPAYQQGQNQLYNELNLGRREEYDVLDKRRGRDPEMGGKPRRKNPQEGLYNELQKDKMAEAYSEIGMKGERRRGKGHDGLYQGLSTATKDTYDALHMQALPPR

SEQ ID NO: 7114 - protein, 478 aa, Artificial Sequence
  source: /note="Description of Artificial Sequence: Synthetic Chimeric Antigen Receptor"
EVKLVESGGGLVQPGGSLSLSCAASGFTFTDYYMSWVRQPPGKALEWLALIRSKADGYTTEYSASVKGRFTLSRDDSQSILYLQMNALRPEDSATYYCARDAAYYSYYSPEGAMDYWGQGTSVTVSSGGGGSGGGGSGGGGSMADYKDIVMTQSHKFMSTSVGDRVNITCKASQNVDSAVAWYQQKPGQSPKALIYSASYRYSGVPDRFTGRGSGTDFTLTISSVQAEDLAVYYCQQYYSTPWTFGGGTKLEIKRTTTPAPRPPTPAPTIASQPLSLRPEACRPAAGGAVHTRGLDFACDIYIWAPLAGTCGVLLLSLVITLYCKRGRKKLLYIFKQPFMRPVQTTQEEDGCSCRFPEEEEGGCELRVKFSRSADAPAYQQGQNQLYNELNLGRREEYDVLDKRRGRDPEMGGKPRRKNPQEGLYNELQKDKMAEAYSEIGMKGERRRGKGHDGLYQGLSTATKDTYDALHMQALPPR

SEQ ID NO: 7115 - protein, 481 aa, Artificial Sequence
  source: /note="Description of Artificial Sequence: Synthetic Chimeric Antigen Receptor"
EVKLVESGGGLVQPGGSLSLSCAASGFTFTDYYMSWVRQPPGKALEWLALIRSKADGYTTEYSASVKGRFTLSRDDSQSILYLQMNALRPEDSATYYCARDAAYYSYYSPEGAMDYWGQGTSVTVSSGGGGSGGGGSGGGGSMADYKDIVMTQSHKFMSTSVGDRVNITCKASQNVDSAVAWYQQKPGQSPKALIYSASYRYSGVPDRFTGRGSGTDFTLTISSVQAEDLAVYYCQQYYSTPWTFGGGTKLEIKRTTTPAPRPPTPAPTIASQPLSLRPEACRPAAGGAVHTRGLDFACDIISFFLALTSTALLFLLFFLTLRFSVVKRGRKKLLYIFKQPFMRPVQTTQEEDGCSCRFPEEEEGGCELRVKFSRSADAPAYQQGQNQLYNELNLGRREEYDVLDKRRGRDPEMGGKPRRKNPQEGLYNELQKDKMAEAYSEIGMKGERRRGKGHDGLYQGLSTATKDTYDALHMQALPPR

SEQ ID NO: 7116 - protein, 664 aa, Artificial Sequence
  source: /note="Description of Artificial Sequence: Synthetic Chimeric Antigen Receptor"
EVKLVESGGGLVQPGGSLSLSCAASGFTFTDYYMSWVRQPPGKALEWLALIRSKADGYTTEYSASVKGRFTLSRDDSQSILYLQMNALRPEDSATYYCARDAAYYSYYSPEGAMDYWGQGTSVTVSSGGGGSGGGGSGGGGSMADYKDIVMTQSHKFMSTSVGDRVNITCKASQNVDSAVAWYQQKPGQSPKALIYSASYRYSGVPDRFTGRGSGTDFTLTISSVQAEDLAVYYCQQYYSTPWTFGGGTKLEIKREPKSPDKTHTCPPCPAPPVAGPSVFLFPPKPKDTLMIARTPEVTCVVVDVSHEDPEVKFNWYVDGVEVHNAKTKPREEQYNSTYRVVSVLTVLHQDWLNGKEYKCKVSNKALPAPIEKTISKAKGQPREPQVYTLPPSRDELTKNQVSLTCLVKGFYPSDIAVEWESNGQPENNYKTTPPVLDSDGSFFLYSKLTVDKSRWQQGNVFSCSVMHEALHNHYTQKSLSLSPGKIYIWAPLAGTCGVLLLSLVITLYCKRGRKKLLYIFKQPFMRPVQTTQEEDGCSCRFPEEEEGGCELRVKFSRSADAPAYQQGQNQLYNELNLGRREEYDVLDKRRGRDPEMGGKPRRKNPQEGLYNELQKDKMAEAYSEIGMKGERRRGKGHDGLYQGLSTATKDTYDALHMQALPPR

SEQ ID NO: 7117 - protein, 667 aa, Artificial Sequence
  source: /note="Description of Artificial Sequence: Synthetic Chimeric Antigen Receptor"
EVKLVESGGGLVQPGGSLSLSCAASGFTFTDYYMSWVRQPPGKALEWLALIRSKADGYTTEYSASVKGRFTLSRDDSQSILYLQMNALRPEDSATYYCARDAAYYSYYSPEGAMDYWGQGTSVTVSSGGGGSGGGGSGGGGSMADYKDIVMTQSHKFMSTSVGDRVNITCKASQNVDSAVAWYQQKPGQSPKALIYSASYRYSGVPDRFTGRGSGTDFTLTISSVQAEDLAVYYCQQYYSTPWTFGGGTKLEIKREPKSPDKTHTCPPCPAPPVAGPSVFLFPPKPKDTLMIARTPEVTCVVVDVSHEDPEVKFNWYVDGVEVHNAKTKPREEQYNSTYRVVSVLTVLHQDWLNGKEYKCKVSNKALPAPIEKTISKAKGQPREPQVYTLPPSRDELTKNQVSLTCLVKGFYPSDIAVEWESNGQPENNYKTTPPVLDSDGSFFLYSKLTVDKSRWQQGNVFSCSVMHEALHNHYTQKSLSLSPGKIISFFLALTSTALLFLLFFLTLRFSVVKRGRKKLLYIFKQPFMRPVQTTQEEDGCSCRFPEEEEGGCELRVKFSRSADAPAYQQGQNQLYNELNLGRREEYDVLDKRRGRDPEMGGKPRRKNPQEGLYNELQKDKMAEAYSEIGMKGERRRGKGHDGLYQGLSTATKDTYDALHMQALPPR

SEQ ID NO: 7118 - protein, 470 aa, Artificial Sequence
  source: /note="Description of Artificial Sequence: Synthetic Chimeric Antigen Receptor"
VQLQESGPGLVKPSQSLSLTCSVTDYSITSGYYWNWIRQFPGNKLEWMGYISYDGSNNYNPSLKNRISITRDTSKNQFFLKLSSVTTEDTATYYCSRGEGFYFDSWGQGTTLTVSSARSGGGGSGGGGSGGGGSDIMMSQSPSSLAVSVGEKFTMTCKSSQSLFFGSTQKNYLAWYQQKPGQSPKLLIYWASTRESGVPDRFTGSGSGTDFTLAISSVMPEDLAVYYCQQYYNYPWTFGGGTKLEIKTTTPAPRPPTPAPTIASQPLSLRPEACRPAAGGAVHTRGLDFACDIYIWAPLAGTCGVLLLSLVITLYCKRGRKKLLYIFKQPFMRPVQTTQEEDGCSCRFPEEEEGGCELRVKFSRSADAPAYQQGQNQLYNELNLGRREEYDVLDKRRGRDPEMGGKPRRKNPQEGLYNELQKDKMAEAYSEIGMKGERRRGKGHDGLYQGLSTATKDTYDALHMQALPPR

SEQ ID NO: 7119 - protein, 679 aa, Artificial Sequence
  source: /note="Description of Artificial Sequence: Synthetic Chimeric Antigen Receptor"
MLLLVTSLLLCELPHPAFLLIPQIQLVQSGPELKKPGETVKISCKASGYIFTNYGMNWVKQAPGKSFKWMGWINTYTGESTYSADFKGRFAFSLETSASTAYLHINDLKNEDTATYFCARSGGYDPMDYWGQGTSVTVSSGGGGSGGGGSGGGGSDIVLTQSPASLAVSLGQRATISCRASESVDNYGNTFMHWYQQKPGQPPKLLIYRASNLESGIPARFSGSGSRTDFTLTINPVEADDVATYYCQQSNEDPPTFGAGTKLELKESKYGPPCPPCPAPEFEGGPSVFLFPPKPKDTLMISRTPEVTCVVVDVSQEDPEVQFNWYVDGVEVHNAKTKPREEQFNSTYRVVSVLTVLHQDWLNGKEYKCKVSNKGLPSSIEKTISKAKGQPREPQVYTLPPSQEEMTKNQVSLTCLVKGFYPSDIAVEWESNGQPENNYKTTPPVLDSDGSFFLYSRLTVDKSRWQEGNVFSCSVMHEALHNHYTQKSLSLSLGKMFWVLVVVGGVLACYSLLVTVAFIIFWVRSKRSRGGHSDYMNMTPRRPGPTRKHYQPYAPPRDFAAYRSGGGRVKFSRSADAPAYQQGQNQLYNELNLGRREEYDVLDKRRGRDPEMGGKPRRKNPQEGLYNELQKDKMAEAYSEIGMKGERRRGKGHDGLYQGLSTATKDTYDALHMQALPPR

SEQ ID NO: 7120 - protein, 672 aa, Artificial Sequence
  source: /note="Description of Artificial Sequence: Synthetic Chimeric Antigen Receptor"
MLLLVTSLLLCELPHPAFLLIPQVQLQQPGAELVRPGASVKLSCKASGYTFTSYWMNWVKQRPDQGLEWIGRIDPYDSETHYNQKFKDKAILTVDKSSSTAYMQLSSLTSEDSAVYYCARGNWDDYWGQGTTLTVSSGGGGSGGGGSGGGGSDVQITQSPSYLAASPGETITINCRASKSISKDLAWYQEKPGKTNKLLIYSGSTLQSGIPSRFSGSGSGTDFTLTISSLEPEDFAMYYCQQHNKYPYTFGGGTKLEIKESKYGPPCPPCPAPEFEGGPSVFLFPPKPKDTLMISRTPEVTCVVVDVSQEDPEVQFNWYVDGVEVHNAKTKPREEQFNSTYRVVSVLTVLHQDWLNGKEYKCKVSNKGLPSSIEKTISKAKGQPREPQVYTLPPSQEEMTKNQVSLTCLVKGFYPSDIAVEWESNGQPENNYKTTPPVLDSDGSFFLYSRLTVDKSRWQEGNVFSCSVMHEALHNHYTQKSLSLSLGKMFWVLVVVGGVLACYSLLVTVAFIIFWVRSKRSRGGHSDYMNMTPRRPGPTRKHYQPYAPPRDFAAYRSGGGRVKFSRSADAPAYQQGQNQLYNELNLGRREEYDVLDKRRGRDPEMGGKPRRKNPQEGLYNELQKDKMAEAYSEIGMKGERRRGKGHDGLYQGLSTATKDTYDALHMQALPPR

SEQ ID NO: 7121 - protein, 679 aa, Artificial Sequence
  source: /note="Description of Artificial Sequence: Synthetic Chimeric Antigen Receptor"
MLLLVTSLLLCELPHPAFLLIPQIQLVQSGPELKKPGETVKISCKASGYIFTNYGMNWVKQAPGKSFKWMGWINTYTGESTYSADFKGRFAFSLETSASTAYLHINDLKNEDTATYFCARSGGYDPMDYWGQGTSVTVSSGGGGSGGGGSGGGGSDIVLTQSPASLAVSLGQRATISCRASESVDNYGNTFMHWYQQKPGQPPKLLIYRASNLESGIPARFSGSGSRTDFTLTINPVEADDVATYYCQQSNEDPPTFGAGTKLELKESKYGPPCPPCPAPEFEGGPSVFLFPPKPKDTLMISRTPEVTCVVVDVSQEDPEVQFNWYVDGVEVHNAKTKPREEQFQSTYRVVSVLTVLHQDWLNGKEYKCKVSNKGLPSSIEKTISKAKGQPREPQVYTLPPSQEEMTKNQVSLTCLVKGFYPSDIAVEWESNGQPENNYKTTPPVLDSDGSFFLYSRLTVDKSRWQEGNVFSCSVMHEALHNHYTQKSLSLSLGKMFWVLVVVGGVLACYSLLVTVAFIIFWVRSKRSRGGHSDYMNMTPRRPGPTRKHYQPYAPPRDFAAYRSGGGRVKFSRSADAPAYQQGQNQLYNELNLGRREEYDVLDKRRGRDPEMGGKPRRKNPQEGLYNELQKDKMAEAYSEIGMKGERRRGKGHDGLYQGLSTATKDTYDALHMQALPPR

SEQ ID NO: 7122 - protein, 672 aa, Artificial Sequence
  source: /note="Description of Artificial Sequence: Synthetic Chimeric Antigen Receptor"
MLLLVTSLLLCELPHPAFLLIPQVQLQQPGAELVRPGASVKLSCKASGYTFTSYWMNWVKQRPDQGLEWIGRIDPYDSETHYNQKFKDKAILTVDKSSSTAYMQLSSLTSEDSAVYYCARGNWDDYWGQGTTLTVSSGGGGSGGGGSGGGGSDVQITQSPSYLAASPGETITINCRASKSISKDLAWYQEKPGKTNKLLIYSGSTLQSGIPSRFSGSGSGTDFTLTISSLEPEDFAMYYCQQHNKYPYTFGGGTKLEIKESKYGPPCPPCPAPEFEGGPSVFLFPPKPKDTLMISRTPEVTCVVVDVSQEDPEVQFNWYVDGVEVHNAKTKPREEQFQSTYRVVSVLTVLHQDWLNGKEYKCKVSNKGLPSSIEKTISKAKGQPREPQVYTLPPSQEEMTKNQVSLTCLVKGFYPSDIAVEWESNGQPENNYKTTPPVLDSDGSFFLYSRLTVDKSRWQEGNVFSCSVMHEALHNHYTQKSLSLSLGKMFWVLVVVGGVLACYSLLVTVAFIIFWVRSKRSRGGHSDYMNMTPRRPGPTRKHYQPYAPPRDFAAYRSGGGRVKFSRSADAPAYQQGQNQLYNELNLGRREEYDVLDKRRGRDPEMGGKPRRKNPQEGLYNELQKDKMAEAYSEIGMKGERRRGKGHDGLYQGLSTATKDTYDALHMQALPPR

SEQ ID NO: 7123 - protein, 520 aa, Artificial Sequence
  source: /note="Description of Artificial Sequence: Synthetic Chimeric Antigen Receptor"
GPVPPSTALRYLIEELVNITQNQKAPLCNGSMVWSINLTAGMYCAALESLINVSGCSAIEKTQRMLSGFCPHKVSAGQFSSLHVRDTKIEVAQFVKDLLLHLKKLFREGRFNESKYGPPCPPCPAPEFEGGPSVFLFPPKPKDTLMISRTPEVTCVVVDVSQEDPEVQFNWYVDGVEVHNAKTKPREEQFQSTYRVVSVLTVLHQDWLNGKEYKCKVSNKGLPSSIEKTISKAKGQPREPQVYTLPPSQEEMTKNQVSLTCLVKGFYPSDIAVEWESNGQPENNYKTTPPVLDSDGSFFLYSRLTVDKSRWQEGNVFSCSVMHEALHNHYTQKSLSLSLGKMALIVLGGVAGLLLFIGLGIFFKRGRKKLLYIFKQPFMRPVQTTQEEDGCSCRFPEEEEGGCELGGGRVKFSRSADAPAYQQGQNQLYNELNLGRREEYDVLDKRRGRDPEMGGKPRRKNPQEGLYNELQKDKMAEAYSEIGMKGERRRGKGHDGLYQGLSTATKDTYDALHMQALPPR

SEQ ID NO: 7124 - protein, 452 aa, Artificial Sequence; identical to SEQ ID NO: 7113
  source: /note="Description of Artificial Sequence: Synthetic Chimeric Antigen Receptor"

SEQ ID NO: 7125 - protein, 478 aa, Artificial Sequence; identical to SEQ ID NO: 7114
  source: /note="Description of Artificial Sequence: Synthetic Chimeric Antigen Receptor"

SEQ ID NO: 7126 - protein, 481 aa, Artificial Sequence; identical to SEQ ID NO: 7115
  source: /note="Description of Artificial Sequence: Synthetic Chimeric Antigen Receptor"

SEQ ID NO: 7127 - protein, 664 aa, Artificial Sequence; identical to SEQ ID NO: 7116
  source: /note="Description of Artificial Sequence: Synthetic Chimeric Antigen Receptor"

SEQ ID NO: 7128 - protein, 667 aa, Artificial Sequence; identical to SEQ ID NO: 7117
  source: /note="Description of Artificial Sequence: Synthetic Chimeric Antigen Receptor"

SEQ ID NO: 7129 - protein, 487 aa, Artificial Sequence
  source: /note="Description of Artificial Sequence: Synthetic Chimeric Antigen Receptor"
MALPVTALLLPLALLLHAARPQVQLVQSGAEVKKPGASVKVSCKASGYTFTGYYMHWVRQAPGQGLEWMGWINPNSGGTNYAQKFQGRVTMTRDTSISTAYMELSRLRSDDTAVYYCARDMNILATVPFDIWGQGTMVTVSSGGGGSGGGGSGGGGSDIQMTQSPSSLSASVGDRVTITCRASQSISTYLNWYQQKPGKAPNLLIYAAFSLQSGVPSRFSGSGSGTDFTLTINSLQPEDFATYYCQQGDSVPLTFGGGTKLEIKTTTPAPRPPTPAPTIASQPLSLRPEACRPAAGGAVHTRGLDFACDIYIWAPLAGTCGVLLLSLVITLYCKRGRKKLLYIFKQPFMRPVQTTQEEDGCSCRFPEEEEGGCELRVKFSRSADAPAYKQGQNQLYNELNLGRREEYDVLDKRRGRDPEMGGKPRRKNPQEGLYNELQKDKMAEAYSEIGMKGERRRGKGHDGLYQGLSTATKDTYDALHMQALPPR

SEQ ID NO: 7130 - protein, 487 aa, Artificial Sequence
  source: /note="Description of Artificial Sequence: Synthetic Chimeric Antigen Receptor"
MALPVTALLLPLALLLHAARPQVQLVQSGAEVKKPGASVKVSCKASGYTFTGYYMHWVRQAPGQGLEWMGWINPNSGGTNYAQKFQGRVTLTRDTSISTVYMELSRLRSDDTAVYYCARDMNILATVPFDIWGQGTMVTVSSGGGGSGGGGSGGGGSDIQMTQSPSSLSASVGDRVTITCRASQSISSYLNWYQQKPGKAPKLLIYAASSLQSGVPSRFSGSGSGTDFTLTVNSLQPEDFATYYCQQGDSVPLTFGGGTRLEIKTTTPAPRPPTPAPTIASQPLSLRPEACRPAAGGAVHTRGLDFACDIYIWAPLAGTCGVLLLSLVITLYCKRGRKKLLYIFKQPFMRPVQTTQEEDGCSCRFPEEEEGGCELRVKFSRSADAPAYKQGQNQLYNELNLGRREEYDVLDKRRGRDPEMGGKPRRKNPQEGLYNELQKDKMAEAYSEIGMKGERRRGKGHDGLYQGLSTATKDTYDALHMQALPPR

SEQ ID NO: 7131 - protein, 487 aa, Artificial Sequence
  source: /note="Description of Artificial Sequence: Synthetic Chimeric Antigen Receptor"
MALPVTALLLPLALLLHAARPQVQLVQSGAEVKKPGASVKVSCKASGYIFTGYYIHWVRQAPGQGLEWMGWINPNSGGTNYAQKFQGRVTMTRDTSISTAYMELSGLRSDDPAVYYCARDMNILATVPFDIWGQGTLVTVSSGGGGSGGGGSGGGGSDIQLTQSPSSLSASVGDRVTITCRASQSISSYLNWYQQKPGKAPKLLIYAASSLQSGVPSRFSGSGSGTDFTLTVNSLQPEDFATYYCQQGDSVPLTFGGGTKVEIKTTTPAPRPPTPAPTIASQPLSLRPEACRPAAGGAVHTRGLDFACDIYIWAPLAGTCGVLLLSLVITLYCKRGRKKLLYIFKQPFMRPVQTTQEEDGCSCRFPEEEEGGCELRVKFSRSADAPAYKQGQNQLYNELNLGRREEYDVLDKRRGRDPEMGGKPRRKNPQEGLYNELQKDKMAEAYSEIGMKGERRRGKGHDGLYQGLSTATKDTYDALHMQALPPR

SEQ ID NO: 7132 - protein, 336 aa, Artificial Sequence
  source: /note="Description of Artificial Sequence: Synthetic Chimeric Antigen Receptor"
MALPVTALLLPLALLLHAARPQVQLQQSGAEVKKSGASVKVSCKASGYTFTDYYMHWLRQAPGQGLEWMGWINPNSGDTNYAQKFQGRVTLTRDTSISTVYMELSRLRSDDTAVYYCARDMNILATVPFDIWGQGTMVTVSSASGGGGSGGRASGGGGSDIQMTQSPSSLSASVGDRVTITCRASQSISSYLNWYQQKPGKAPKLLIYAASSLQSGVPSRFSGSGSGTDFTLTISSLQPEDFATYYCQQGDSVPLTFGGGTKVEIKTTTPAPRPPTPAPTIASQPLSLRPEACRPAAGGAVHTRGLDFACDIYIWAPLAGTCGVLLLSLVITLYCK

SEQ ID NO: 7133 - protein, 486 aa, Artificial Sequence
  source: /note="Description of Artificial Sequence: Synthetic Chimeric Antigen Receptor"
MALPVTALLLPLALLLHAARPQVQLVQSGAEVKKPGASVKVSCKASGYTFTSYWMNWVRQAPGQGLEWMGRIDPYDSETHYNQKFKDRVTMTVDKSTSTAYMELSSLRSEDTAVYYCARGNWDDYWGQGTTVTVSSGGGGSGGGGSGGGGSGGGGSDVQLTQSPSFLSASVGDRVTITCRASKSISKDLAWYQQKPGKAPKLLIYSGSTLQSGVPSRFSGSGSGTEFTLTISSLQPEDFATYYCQQHNKYPYTFGGGTKVEIKTTTPAPRPPTPAPTIASQPLSLRPEACRPAAGGAVHTRGLDFACDIYIWAPLAGTCGVLLLSLVITLYCKRGRKKLLYIFKQPFMRPVQTTQEEDGCSCRFPEEEEGGCELRVKFSRSADAPAYKQGQNQLYNELNLGRREEYDVLDKRRGRDPEMGGKPRRKNPQEGLYNELQKDKMAEAYSEIGMKGERRRGKGHDGLYQGLSTATKDTYDALHMQALPPR

SEQ ID NO: 7134 - protein, 486 aa, Artificial Sequence
  source: /note="Description of Artificial Sequence: Synthetic Chimeric Antigen Receptor"
MALPVTALLLPLALLLHAARPQVQLVQSGAEVKKPGASVKVSCKASGYTFTSYWMNWVRQAPGQGLEWMGRIDPYDSETHYNQKFKDRVTMTVDKSTSTAYMELSSLRSEDTAVYYCARGNWDDYWGQGTTVTVSSGGGGSGGGGSGGGGSGGGGSEVVLTQSPATLSLSPGERATLSCRASKSISKDLAWYQQKPGQAPRLLIYSGSTLQSGIPARFSGSGSGTDFTLTISSLEPEDFAVYYCQQHNKYPYTFGGGTKVEIKTTTPAPRPPTPAPTIASQPLSLRPEACRPAAGGAVHTRGLDFACDIYIWAPLAGTCGVLLLSLVITLYCKRGRKKLLYIFKQPFMRPVQTTQEEDGCSCRFPEEEEGGCELRVKFSRSADAPAYKQGQNQLYNELNLGRREEYDVLDKRRGRDPEMGGKPRRKNPQEGLYNELQKDKMAEAYSEIGMKGERRRGKGHDGLYQGLSTATKDTYDALHMQALPPR

SEQ ID NO: 7135 - protein, 486 aa, Artificial Sequence
  source: /note="Description of Artificial Sequence: Synthetic Chimeric Antigen Receptor"
MALPVTALLLPLALLLHAARPQVQLVQSGAEVKKPGASVKVSCKASGYTFTSYWMNWVRQAPGQGLEWMGRIDPYDSETHYNQKFKDRVTMTVDKSTSTAYMELSSLRSEDTAVYYCARGNWDDYWGQGTTVTVSSGGGGSGGGGSGGGGSGGGGSDVVMTQSPAFLSVTPGEKVTITCRASKSISKDLAWYQQKPDQAPKLLIYSGSTLQSGVPSRFSGSGSGTDFTFTISSLEAEDAATYYCQQHNKYPYTFGGGTKVEIKTTTPAPRPPTPAPTIASQPLSLRPEACRPAAGGAVHTRGLDFACDIYIWAPLAGTCGVLLLSLVITLYCKRGRKKLLYIFKQPFMRPVQTTQEEDGCSCRFPEEEEGGCELRVKFSRSADAPAYKQGQNQLYNELNLGRREEYDVLDKRRGRDPEMGGKPRRKNPQEGLYNELQKDKMAEAYSEIGMKGERRRGKGHDGLYQGLSTATKDTYDALHMQALPPR

SEQ ID NO: 7136 - protein, 486 aa, Artificial Sequence
  source: /note="Description of Artificial Sequence: Synthetic Chimeric Antigen Receptor"
MALPVTALLLPLALLLHAARPQVQLVQSGAEVKKPGASVKVSCKASGYTFTSYWMNWVRQAPGQGLEWMGRIDPYDSETHYNQKFKDRVTMTVDKSTSTAYMELSSLRSEDTAVYYCARGNWDDYWGQGTTVTVSSGGGGSGGGGSGGGGSGGGGSDVVMTQSPDSLAVSLGERATINCRASKSISKDLAWYQQKPGQPPKLLIYSGSTLQSGVPDRFSGSGSGTDFTLTISSLQAEDVAVYYCQQHNKYPYTFGGGTKVEIKTTTPAPRPPTPAPTIASQPLSLRPEACRPAAGGAVHTRGLDFACDIYIWAPLAGTCGVLLLSLVITLYCKRGRKKLLYIFKQPFMRPVQTTQEEDGCSCRFPEEEEGGCELRVKFSRSADAPAYKQGQNQLYNELNLGRREEYDVLDKRRGRDPEMGGKPRRKNPQEGLYNELQKDKMAEAYSEIGMKGERRRGKGHDGLYQGLSTATKDTYDALHMQALPPR

SEQ ID NO: 7137 - protein, 486 aa, Artificial Sequence
  source: /note="Description of Artificial Sequence: Synthetic Chimeric Antigen Receptor"
MALPVTALLLPLALLLHAARPDVQLTQSPSFLSASVGDRVTITCRASKSISKDLAWYQQKPGKAPKLLIYSGSTLQSGVPSRFSGSGSGTEFTLTISSLQPEDFATYYCQQHNKYPYTFGGGTKVEIKGGGGSGGGGSGGGGSGGGGSQVQLVQSGAEVKKPGASVKVSCKASGYTFTSYWMNWVRQAPGQGLEWMGRIDPYDSETHYNQKFKDRVTMTVDKSTSTAYMELSSLRSEDTAVYYCARGNWDDYWGQGTTVTVSSTTTPAPRPPTPAPTIASQPLSLRPEACRPAAGGAVHTRGLDFACDIYIWAPLAGTCGVLLLSLVITLYCKRGRKKLLYIFKQPFMRPVQTTQEEDGCSCRFPEEEEGGCELRVKFSRSADAPAYKQGQNQLYNELNLGRREEYDVLDKRRGRDPEMGGKPRRKNPQEGLYNELQKDKMAEAYSEIGMKGERRRGKGHDGLYQGLSTATKDTYDALHMQALPPR

SEQ ID NO: 7138 - protein, 486 aa, Artificial Sequence
  source: /note="Description of Artificial Sequence: Synthetic Chimeric Antigen Receptor"
MALPVTALLLPLALLLHAARPEVVLTQSPATLSLSPGERATLSCRASKSISKDLAWYQQKPGQAPRLLIYSGSTLQSGIPARFSGSGSGTDFTLTISSLEPEDFAVYYCQQHNKYPYTFGGGTKVEIKGGGGSGGGGSGGGGSGGGGSQVQLVQSGAEVKKPGASVKVSCKASGYTFTSYWMNWVRQAPGQGLEWMGRIDPYDSETHYNQKFKDRVTMTVDKSTSTAYMELSSLRSEDTAVYYCARGNWDDYWGQGTTVTVSSTTTPAPRPPTPAPTIASQPLSLRPEACRPAAGGAVHTRGLDFACDIYIWAPLAGTCGVLLLSLVITLYCKRGRKKLLYIFKQPFMRPVQTTQEEDGCSCRFPEEEEGGCELRVKFSRSADAPAYKQGQNQLYNELNLGRREEYDVLDKRRGRDPEMGGKPRRKNPQEGLYNELQKDKMAEAYSEIGMKGERRRGKGHDGLYQGLSTATKDTYDALHMQALPPR

SEQ ID NO: 7139 - protein, 486 aa, Artificial Sequence
  source: /note="Description of Artificial Sequence: Synthetic Chimeric Antigen Receptor"
MALPVTALLLPLALLLHAARPDVVMTQSPAFLSVTPGEKVTITCRASKSISKDLAWYQQKPDQAPKLLIYSGSTLQSGVPSRFSGSGSGTDFTFTISSLEAEDAATYYCQQHNKYPYTFGGGTKVEIKGGGGSGGGGSGGGGSGGGGSQVQLVQSGAEVKKPGASVKVSCKASGYTFTSYWMNWVRQAPGQGLEWMGRIDPYDSETHYNQKFKDRVTMTVDKSTSTAYMELSSLRSEDTAVYYCARGNWDDYWGQGTTVTVSSTTTPAPRPPTPAPTIASQPLSLRPEACRPAAGGAVHTRGLDFACDIYIWAPLAGTCGVLLLSLVITLYCKRGRKKLLYIFKQPFMRPVQTTQEEDGCSCRFPEEEEGGCELRVKFSRSADAPAYKQGQNQLYNELNLGRREEYDVLDKRRGRDPEMGGKPRRKNPQEGLYNELQKDKMAEAYSEIGMKGERRRGKGHDGLYQGLSTATKDTYDALHMQALPPR

SEQ ID NO: 7140 - protein, 486 aa, Artificial Sequence
  source: /note="Description of Artificial Sequence: Synthetic Chimeric Antigen Receptor"
MALPVTALLLPLALLLHAARPDVVMTQSPDSLAVSLGERATINCRASKSISKDLAWYQQKPGQPPKLLIYSGSTLQSGVPDRFSGSGSGTDFTLTISSLQAEDVAVYYCQQHNKYPYTFGGGTKVEIKGGGGSGGGGSGGGGSGGGGSQVQLVQSGAEVKKPGASVKVSCKASGYTFTSYWMNWVRQAPGQGLEWMGRIDPYDSETHYNQKFKDRVTMTVDKSTSTAYMELSSLRSEDTAVYYCARGNWDDYWGQGTTVTVSSTTTPAPRPPTPAPTIASQPLSLRPEACRPAAGGAVHTRGLDFACDIYIWAPLAGTCGVLLLSLVITLYCKRGRKKLLYIFKQPFMRPVQTTQEEDGCSCRFPEEEEGGCELRVKFSRSADAPAYKQGQNQLYNELNLGRREEYDVLDKRRGRDPEMGGKPRRKNPQEGLYNELQKDKMAEAYSEIGMKGERRRGKGHDGLYQGLSTATKDTYDALHMQALPPR

SEQ ID NO: 7141 - protein, 486 aa, Artificial Sequence
  source: /note="Description of Artificial Sequence: Synthetic Chimeric Antigen Receptor"
MALPVTALLLPLALLLHAARPQVQLVQSGSELKKPGASVKVSCKASGYTFTSYWMNWVRQAPGQGLEWMGRIDPYDSETHYNQKFKDRFVFSVDKSVSTAYLQISSLKAEDTAVYYCARGNWDDYWGQGTTVTVSSGGGGSGGGGSGGGGSGGGGSDVQLTQSPSFLSASVGDRVTITCRASKSISKDLAWYQQKPGKAPKLLIYSGSTLQSGVPSRFSGSGSGTEFTLTISSLQPEDFATYYCQQHNKYPYTFGGGTKVEIKTTTPAPRPPTPAPTIASQPLSLRPEACRPAAGGAVHTRGLDFACDIYIWAPLAGTCGVLLLSLVITLYCKRGRKKLLYIFKQPFMRPVQTTQEEDGCSCRFPEEEEGGCELRVKFSRSADAPAYKQGQNQLYNELNLGRREEYDVLDKRRGRDPEMGGKPRRKNPQEGLYNELQKDKMAEAYSEIGMKGERRRGKGHDGLYQGLSTATKDTYDALHMQALPPR

SEQ ID NO: 7142 - protein, 486 aa, Artificial Sequence
  source: /note="Description of Artificial Sequence: Synthetic Chimeric Antigen Receptor"
MALPVTALLLPLALLLHAARPQVQLVQSGSELKKPGASVKVSCKASGYTFTSYWMNWVRQAPGQGLEWMGRIDPYDSETHYNQKFKDRFVFSVDKSVSTAYLQISSLKAEDTAVYYCARGNWDDYWGQGTTVTVSSGGGGSGGGGSGGGGSGGGGSEVVLTQSPATLSLSPGERATLSCRASKSISKDLAWYQQKPGQAPRLLIYSGSTLQSGIPARFSGSGSGTDFTLTISSLEPEDFAVYYCQQHNKYPYTFGGGTKVEIKTTTPAPRPPTPAPTIASQPLSLRPEACRPAAGGAVHTRGLDFACDIYIWAPLAGTCGVLLLSLVITLYCKRGRKKLLYIFKQPFMRPVQTTQEEDGCSCRFPEEEEGGCELRVKFSRSADAPAYKQGQNQLYNELNLGRREEYDVLDKRRGRDPEMGGKPRRKNPQEGLYNELQKDKMAEAYSEIGMKGERRRGKGHDGLYQGLSTATKDTYDALHMQALPPR

SEQ ID NO: 7143 - protein, 486 aa, Artificial Sequence
  source: /note="Description of Artificial Sequence: Synthetic Chimeric Antigen Receptor"
MALPVTALLLPLALLLHAARPQVQLVQSGSELKKPGASVKVSCKASGYTFTSYWMNWVRQAPGQGLEWMGRIDPYDSETHYNQKFKDRFVFSVDKSVSTAYLQISSLKAEDTAVYYCARGNWDDYWGQGTTVTVSSGGGGSGGGGSGGGGSGGGGSDVVMTQSPAFLSVTPGEKVTITCRASKSISKDLAWYQQKPDQAPKLLIYSGSTLQSGVPSRFSGSGSGTDFTFTISSLEAEDAATYYCQQHNKYPYTFGGGTKVEIKTTTPAPRPPTPAPTIASQPLSLRPEACRPAAGGAVHTRGLDFACDIYIWAPLAGTCGVLLLSLVITLYCKRGRKKLLYIFKQPFMRPVQTTQEEDGCSCRFPEEEEGGCELRVKFSRSADAPAYKQGQNQLYNELNLGRREEYDVLDKRRGRDPEMGGKPRRKNPQEGLYNELQKDKMAEAYSEIGMKGERRRGKGHDGLYQGLSTATKDTYDALHMQALPPR

SEQ ID NO: 7144 - protein, 486 aa, Artificial Sequence
  source: /note="Description of Artificial Sequence: Synthetic Chimeric Antigen Receptor"
MALPVTALLLPLALLLHAARPQVQLVQSGSELKKPGASVKVSCKASGYTFTSYWMNWVRQAPGQGLEWMGRIDPYDSETHYNQKFKDRFVFSVDKSVSTAYLQISSLKAEDTAVYYCARGNWDDYWGQGTTVTVSSGGGGSGGGGSGGGGSGGGGSDVVMTQSPDSLAVSLGERATINCRASKSISKDLAWYQQKPGQPPKLLIYSGSTLQSGVPDRFSGSGSGTDFTLTISSLQAEDVAVYYCQQHNKYPYTFGGGTKVEIKTTTPAPRPPTPAPTIASQPLSLRPEACRPAAGGAVHTRGLDFACDIYIWAPLAGTCGVLLLSLVITLYCKRGRKKLLYIFKQPFMRPVQTTQEEDGCSCRFPEEEEGGCELRVKFSRSADAPAYKQGQNQLYNELNLGRREEYDVLDKRRGRDPEMGGKPRRKNPQEGLYNELQKDKMAEAYSEIGMKGERRRGKGHDGLYQGLSTATKDTYDALHMQALPPR

SEQ ID NO: 7145 - protein, 486 aa, Artificial Sequence
  source: /note="Description of Artificial Sequence: Synthetic Chimeric Antigen Receptor"
MALPVTALLLPLALLLHAARPDVQLTQSPSFLSASVGDRVTITCRASKSISKDLAWYQQKPGKAPKLLIYSGSTLQSGVPSRFSGSGSGTEFTLTISSLQPEDFATYYCQQHNKYPYTFGGGTKVEIKGGGGSGGGGSGGGGSGGGGSQVQLVQSGSELKKPGASVKVSCKASGYTFTSYWMNWVRQAPGQGLEWMGRIDPYDSETHYNQKFKDRFVFSVDKSVSTAYLQISSLKAEDTAVYYCARGNWDDYWGQGTTVTVSSTTTPAPRPPTPAPTIASQPLSLRPEACRPAAGGAVHTRGLDFACDIYIWAPLAGTCGVLLLSLVITLYCKRGRKKLLYIFKQPFMRPVQTTQEEDGCSCRFPEEEEGGCELRVKFSRSADAPAYKQGQNQLYNELNLGRREEYDVLDKRRGRDPEMGGKPRRKNPQEGLYNELQKDKMAEAYSEIGMKGERRRGKGHDGLYQGLSTATKDTYDALHMQALPPR

SEQ ID NO: 7146 - protein, 486 aa, Artificial Sequence
  source: /note="Description of Artificial Sequence: Synthetic Chimeric Antigen Receptor"
MALPVTALLLPLALLLHAARPEVVLTQSPATLSLSPGERATLSCRASKSISKDLAWYQQKPGQAPRLLIYSGSTLQSGIPARFSGSGSGTDFTLTISSLEPEDFAVYYCQQHNKYPYTFGGGTKVEIKGGGGSGGGGSGGGGSGGGGSQVQLVQSGSELKKPGASVKVSCKASGYTFTSYWMNWVRQAPGQGLEWMGRIDPYDSETHYNQKFKDRFVFSVDKSVSTAYLQISSLKAEDTAVYYCARGNWDDYWGQGTTVTVSSTTTPAPRPPTPAPTIASQPLSLRPEACRPAAGGAVHTRGLDFACDIYIWAPLAGTCGVLLLSLVITLYCKRGRKKLLYIFKQPFMRPVQTTQEEDGCSCRFPEEEEGGCELRVKFSRSADAPAYKQGQNQLYNELNLGRREEYDVLDKRRGRDPEMGGKPRRKNPQEGLYNELQKDKMAEAYSEIGMKGERRRGKGHDGLYQGLSTATKDTYDALHMQALPPR

SEQ ID NO: 7147 - protein, 486 aa, Artificial Sequence
  source: /note="Description of Artificial Sequence: Synthetic Chimeric Antigen Receptor"
MALPVTALLLPLALLLHAARPDVVMTQSPAFLSVTPGEKVTITCRASKSISKDLAWYQQKPDQAPKLLIYSGSTLQSGVPSRFSGSGSGTDFTFTISSLEAEDAATYYCQQHNKYPYTFGGGTKVEIKGGGGSGGGGSGGGGSGGGGSQVQLVQSGSELKKPGASVKVSCKASGYTFTSYWMNWVRQAPGQGLEWMGRIDPYDSETHYNQKFKDRFVFSVDKSVSTAYLQISSLKAEDTAVYYCARGNWDDYWGQGTTVTVSSTTTPAPRPPTPAPTIASQPLSLRPEACRPAAGGAVHTRGLDFACDIYIWAPLAGTCGVLLLSLVITLYCKRGRKKLLYIFKQPFMRPVQTTQEEDGCSCRFPEEEEGGCELRVKFSRSADAPAYKQGQNQLYNELNLGRREEYDVLDKRRGRDPEMGGKPRRKNPQEGLYNELQKDKMAEAYSEIGMKGERRRGKGHDGLYQGLSTATKDTYDALHMQALPPR

SEQ ID NO: 7148 - protein, 486 aa, Artificial Sequence
  source: /note="Description of Artificial Sequence: Synthetic Chimeric Antigen Receptor"
MALPVTALLLPLALLLHAARPDVVMTQSPDSLAVSLGERATINCRASKSISKDLAWYQQKPGQPPKLLIYSGSTLQSGVPDRFSGSGSGTDFTLTISSLQAEDVAVYYCQQHNKYPYTFGGGTKVEIKGGGGSGGGGSGGGGSGGGGSQVQLVQSGSELKKPGASVKVSCKASGYTFTSYWMNWVRQAPGQGLEWMGRIDPYDSETHYNQKFKDRFVFSVDKSVSTAYLQISSLKAEDTAVYYCARGNWDDYWGQGTTVTVSSTTTPAPRPPTPAPTIASQPLSLRPEACRPAAGGAVHTRGLDFACDIYIWAPLAGTCGVLLLSLVITLYCKRGRKKLLYIFKQPFMRPVQTTQEEDGCSCRFPEEEEGGCELRVKFSRSADAPAYKQGQNQLYNELNLGRREEYDVLDKRRGRDPEMGGKPRRKNPQEGLYNELQKDKMAEAYSEIGMKGERRRGKGHDGLYQGLSTATKDTYDALHMQALPPR

SEQ ID NO: 7149 - protein, 486 aa, Artificial Sequence
  source: /note="Description of Artificial Sequence: Synthetic Chimeric Antigen Receptor"
MALPVTALLLPLALLLHAARPEVQLVQSGAEVKKPGESLRISCKGSGYTFTSYWMNWVRQMPGKGLEWMGRIDPYDSETHYNQKFKDHVTISVDKSISTAYLQWSSLKASDTAMYYCARGNWDDYWGQGTTVTVSSGGGGSGGGGSGGGGSGGGGSDVQLTQSPSFLSASVGDRVTITCRASKSISKDLAWYQQKPGKAPKLLIYSGSTLQSGVPSRFSGSGSGTEFTLTISSLQPEDFATYYCQQHNKYPYTFGGGTKVEIKTTTPAPRPPTPAPTIASQPLSLRPEACRPAAGGAVHTRGLDFACDIYIWAPLAGTCGVLLLSLVITLYCKRGRKKLLYIFKQPFMRPVQTTQEEDGCSCRFPEEEEGGCELRVKFSRSADAPAYKQGQNQLYNELNLGRREEYDVLDKRRGRDPEMGGKPRRKNPQEGLYNELQKDKMAEAYSEIGMKGERRRGKGHDGLYQGLSTATKDTYDALHMQALPPR

SEQ ID NO: 7150 - protein, 486 aa, Artificial Sequence
  source: /note="Description of Artificial Sequence: Synthetic Chimeric Antigen Receptor"
MALPVTALLLPLALLLHAARPEVQLVQSGAEVKKPGESLRISCKGSGYTFTSYWMNWVRQMPGKGLEWMGRIDPYDSETHYNQKFKDHVTISVDKSISTAYLQWSSLKASDTAMYYCARGNWDDYWGQGTTVTVSSGGGGSGGGGSGGGGSGGGGSEVVLTQSPATLSLSPGERATLSCRASKSISKDLAWYQQKPGQAPRLLIYSGSTLQSGIPARFSGSGSGTDFTLTISSLEPEDFAVYYCQQHNKYPYTFGGGTKVEIKTTTPAPRPPTPAPTIASQPLSLRPEACRPAAGGAVHTRGLDFACDIYIWAPLAGTCGVLLLSLVITLYCKRGRKKLLYIFKQPFMRPVQTTQEEDGCSCRFPEEEEGGCELRVKFSRSADAPAYKQGQNQLYNELNLGRREEYDVLDKRRGRDPEMGGKPRRKNPQEGLYNELQKDKMAEAYSEIGMKGERRRGKGHDGLYQGLSTATKDTYDALHMQALPPR

SEQ ID NO: 7151 - protein, 486 aa, Artificial Sequence
  source: /note="Description of Artificial Sequence: Synthetic Chimeric Antigen Receptor"
MALPVTALLLPLALLLHAARPEVQLVQSGAEVKKPGESLRISCKGSGYTFTSYWMNWVRQMPGKGLEWMGRIDPYDSETHYNQKFKDHVTISVDKSISTAYLQWSSLKASDTAMYYCARGNWDDYWGQGTTVTVSSGGGGSGGGGSGGGGSGGGGSDVVMTQSPAFLSVTPGEKVTITCRASKSISKDLAWYQQKPDQAPKLLIYSGSTLQSGVPSRFSGSGSGTDFTFTISSLEAEDAATYYCQQHNKYPYTFGGGTKVEIKTTTPAPRPPTPAPTIASQPLSLRPEACRPAAGGAVHTRGLDFACDIYIWAPLAGTCGVLLLSLVITLYCKRGRKKLLYIFKQPFMRPVQTTQEEDGCSCRFPEEEEGGCELRVKFSRSADAPAYKQGQNQLYNELNLGRREEYDVLDKRRGRDPEMGGKPRRKNPQEGLYNELQKDKMAEAYSEIGMKGERRRGKGHDGLYQGLSTATKDTYDALHMQALPPR

SEQ ID NO: 7152 - protein, 486 aa, Artificial Sequence
  source: /note="Description of Artificial Sequence: Synthetic Chimeric Antigen Receptor"
MALPVTALLLPLALLLHAARPEVQLVQSGAEVKKPGESLRISCKGSGYTFTSYWMNWVRQMPGKGLEWMGRIDPYDSETHYNQKFKDHVTISVDKSISTAYLQWSSLKASDTAMYYCARGNWDDYWGQGTTVTVSSGGGGSGGGGSGGGGSGGGGSDVVMTQSPDSLAVSLGERATINCRASKSISKDLAWYQQKPGQPPKLLIYSGSTLQSGVPDRFSGSGSGTDFTLTISSLQAEDVAVYYCQQHNKYPYTFGGGTKVEIKTTTPAPRPPTPAPTIASQPLSLRPEACRPAAGGAVHTRGLDFACDIYIWAPLAGTCGVLLLSLVITLYCKRGRKKLLYIFKQPFMRPVQTTQEEDGCSCRFPEEEEGGCELRVKFSRSADAPAYKQGQNQLYNELNLGRREEYDVLDKRRGRDPEMGGKPRRKNPQEGLYNELQKDKMAEAYSEIGMKGERRRGKGHDGLYQGLSTATKDTYDALHMQALPPR

SEQ ID NO: 7153 - protein, 486 aa, Artificial Sequence
  source: /note="Description of Artificial Sequence: Synthetic Chimeric Antigen Receptor"
MALPVTALLLPLALLLHAARPDVQLTQSPSFLSASVGDRVTITCRASKSISKDLAWYQQKPGKAPKLLIYSGSTLQSGVPSRFSGSGSGTEFTLTISSLQPEDFATYYCQQHNKYPYTFGGGTKVEIKGGGGSGGGGSGGGGSGGGGSEVQLVQSGAEVKKPGESLRISCKGSGYTFTSYWMNWVRQMPGKGLEWMGRIDPYDSETHYNQKFKDHVTISVDKSISTAYLQWSSLKASDTAMYYCARGNWDDYWGQGTTVTVSSTTTPAPRPPTPAPTIASQPLSLRPEACRPAAGGAVHTRGLDFACDIYIWAPLAGTCGVLLLSLVITLYCKRGRKKLLYIFKQPFMRPVQTTQEEDGCSCRFPEEEEGGCELRVKFSRSADAPAYKQGQNQLYNELNLGRREEYDVLDKRRGRDPEMGGKPRRKNPQEGLYNELQKDKMAEAYSEIGMKGERRRGKGHDGLYQGLSTATKDTYDALHMQALPPR

SEQ ID NO: 7154 - protein, 486 aa, Artificial Sequence
  source: /note="Description of Artificial Sequence: Synthetic Chimeric Antigen Receptor"
MALPVTALLLPLALLLHAARPEVVLTQSPATLSLSPGERATLSCRASKSISKDLAWYQQKPGQAPRLLIYSGSTLQSGIPARFSGSGSGTDFTLTISSLEPEDFAVYYCQQHNKYPYTFGGGTKVEIKGGGGSGGGGSGGGGSGGGGSEVQLVQSGAEVKKPGESLRISCKGSGYTFTSYWMNWVRQMPGKGLEWMGRIDPYDSETHYNQKFKDHVTISVDKSISTAYLQWSSLKASDTAMYYCARGNWDDYWGQGTTVTVSSTTTPAPRPPTPAPTIASQPLSLRPEACRPAAGGAVHTRGLDFACDIYIWAPLAGTCGVLLLSLVITLYCKRGRKKLLYIFKQPFMRPVQTTQEEDGCSCRFPEEEEGGCELRVKFSRSADAPAYKQGQNQLYNELNLGRREEYDVLDKRRGRDPEMGGKPRRKNPQEGLYNELQKDKMAEAYSEIGMKGERRRGKGHDGLYQGLSTATKDTYDALHMQALPPR

SEQ ID NO: 7155 - protein, 486 aa, Artificial Sequence
  source: /note="Description of Artificial Sequence: Synthetic Chimeric Antigen Receptor"
MALPVTALLLPLALLLHAARPDVVMTQSPAFLSVTPGEKVTITCRASKSISKDLAWYQQKPDQAPKLLIYSGSTLQSGVPSRFSGSGSGTDFTFTISSLEAEDAATYYCQQHNKYPYTFGGGTKVEIKGGGGSGGGGSGGGGSGGGGSEVQLVQSGAEVKKPGESLRISCKGSGYTFTSYWMNWVRQMPGKGLEWMGRIDPYDSETHYNQKFKDHVTISVDKSISTAYLQWSSLKASDTAMYYCARGNWDDYWGQGTTVTVSSTTTPAPRPPTPAPTIASQPLSLRPEACRPAAGGAVHTRGLDFACDIYIWAPLAGTCGVLLLSLVITLYCKRGRKKLLYIFKQPFMRPVQTTQEEDGCSCRFPEEEEGGCELRVKFSRSADAPAYKQGQNQLYNELNLGRREEYDVLDKRRGRDPEMGGKPRRKNPQEGLYNELQKDKMAEAYSEIGMKGERRRGKGHDGLYQGLSTATKDTYDALHMQALPPR

SEQ ID NO: 7156 - protein, 486 aa, Artificial Sequence
  source: /note="Description of Artificial Sequence: Synthetic Chimeric Antigen Receptor"
MALPVTALLLPLALLLHAARPDVVMTQSPDSLAVSLGERATINCRASKSISKDLAWYQQKPGQPPKLLIYSGSTLQSGVPDRFSGSGSGTDFTLTISSLQAEDVAVYYCQQHNKYPYTFGGGTKVEIKGGGGSGGGGSGGGGSGGGGSEVQLVQSGAEVKKPGESLRISCKGSGYTFTSYWMNWVRQMPGKGLEWMGRIDPYDSETHYNQKFKDHVTISVDKSISTAYLQWSSLKASDTAMYYCARGNWDDYWGQGTTVTVSSTTTPAPRPPTPAPTIASQPLSLRPEACRPAAGGAVHTRGLDFACDIYIWAPLAGTCGVLLLSLVITLYCKRGRKKLLYIFKQPFMRPVQTTQEEDGCSCRFPEEEEGGCELRVKFSRSADAPAYKQGQNQLYNELNLGRREEYDVLDKRRGRDPEMGGKPRRKNPQEGLYNELQKDKMAEAYSEIGMKGERRRGKGHDGLYQGLSTATKDTYDALHMQALPPR

SEQ ID NO: 7157 - protein, 486 aa, Artificial Sequence
  source: /note="Description of Artificial Sequence: Synthetic Chimeric Antigen Receptor"
MALPVTALLLPLALLLHAARPEVQLVESGGGLVQPGGSLRLSCAASGYTFTSYWMNWVRQAPGKGLVWVSRIDPYDSETHYNQKFKDRFTISVDKAKSTAYLQMNSLRAEDTAVYYCARGNWDDYWGQGTTVTVSSGGGGSGGGGSGGGGSGGGGSDVQLTQSPSFLSASVGDRVTITCRASKSISKDLAWYQQKPGKAPKLLIYSGSTLQSGVPSRFSGSGSGTEFTLTISSLQPEDFATYYCQQHNKYPYTFGGGTKVEIKTTTPAPRPPTPAPTIASQPLSLRPEACRPAAGGAVHTRGLDFACDIYIWAPLAGTCGVLLLSLVITLYCKRGRKKLLYIFKQPFMRPVQTTQEEDGCSCRFPEEEEGGCELRVKFSRSADAPAYKQGQNQLYNELNLGRREEYDVLDKRRGRDPEMGGKPRRKNPQEGLYNELQKDKMAEAYSEIGMKGERRRGKGHDGLYQGLSTATKDTYDALHMQALPPR

SEQ ID NO: 7158 - protein, 486 aa, Artificial Sequence
  source: /note="Description of Artificial Sequence: Synthetic Chimeric Antigen Receptor"
MALPVTALLLPLALLLHAARPEVQLVESGGGLVQPGGSLRLSCAASGYTFTSYWMNWVRQAPGKGLVWVSRIDPYDSETHYNQKFKDRFTISVDKAKSTAYLQMNSLRAEDTAVYYCARGNWDDYWGQGTTVTVSSGGGGSGGGGSGGGGSGGGGSEVVLTQSPATLSLSPGERATLSCRASKSISKDLAWYQQKPGQAPRLLIYSGSTLQSGIPARFSGSGSGTDFTLTISSLEPEDFAVYYCQQHNKYPYTFGGGTKVEIKTTTPAPRPPTPAPTIASQPLSLRPEACRPAAGGAVHTRGLDFACDIYIWAPLAGTCGVLLLSLVITLYCKRGRKKLLYIFKQPFMRPVQTTQEEDGCSCRFPEEEEGGCELRVKFSRSADAPAYKQGQNQLYNELNLGRREEYDVLDKRRGRDPEMGGKPRRKNPQEGLYNELQKDKMAEAYSEIGMKGERRRGKGHDGLYQGLSTATKDTYDALHMQALPPR

SEQ ID NO: 7159 - protein, 486 aa, Artificial Sequence
  source: /note="Description of Artificial Sequence: Synthetic Chimeric Antigen Receptor"
MALPVTALLLPLALLLHAARPEVQLVESGGGLVQPGGSLRLSCAASGYTFTSYWMNWVRQAPGKGLVWVSRIDPYDSETHYNQKFKDRFTISVDKAKSTAYLQMNSLRAEDTAVYYCARGNWDDYWGQGTTVTVSSGGGGSGGGGSGGGGSGGGGSDVVMTQSPAFLSVTPGEKVTITCRASKSISKDLAWYQQKPDQAPKLLIYSGSTLQSGVPSRFSGSGSGTDFTFTISSLEAEDAATYYCQQHNKYPYTFGGGTKVEIKTTTPAPRPPTPAPTIASQPLSLRPEACRPAAGGAVHTRGLDFACDIYIWAPLAGTCGVLLLSLVITLYCKRGRKKLLYIFKQPFMRPVQTTQEEDGCSCRFPEEEEGGCELRVKFSRSADAPAYKQGQNQLYNELNLGRREEYDVLDKRRGRDPEMGGKPRRKNPQEGLYNELQKDKMAEAYSEIGMKGERRRGKGHDGLYQGLSTATKDTYDALHMQALPPR

SEQ ID NO: 7160 - protein, 486 aa, Artificial Sequence
  source: /note="Description of Artificial Sequence: Synthetic Chimeric Antigen Receptor"
MALPVTALLLPLALLLHAARPEVQLVESGGGLVQPGGSLRLSCAASGYTFTSYWMNWVRQAPGKGLVWVSRIDPYDSETHYNQKFKDRFTISVDKAKSTAYLQMNSLRAEDTAVYYCARGNWDDYWGQGTTVTVSSGGGGSGGGGSGGGGSGGGGSDVVMTQSPDSLAVSLGERATINCRASKSISKDLAWYQQKPGQPPKLLIYSGSTLQSGVPDRFSGSGSGTDFTLTISSLQAEDVAVYYCQQHNKYPYTFGGGTKVEIKTTTPAPRPPTPAPTIASQPLSLRPEACRPAAGGAVHTRGLDFACDIYIWAPLAGTCGVLLLSLVITLYCKRGRKKLLYIFKQPFMRPVQTTQEEDGCSCRFPEEEEGGCELRVKFSRSADAPAYKQGQNQLYNELNLGRREEYDVLDKRRGRDPEMGGKPRRKNPQEGLYNELQKDKMAEAYSEIGMKGERRRGKGHDGLYQGLSTATKDTYDALHMQALPPR

SEQ ID NO: 7161 - protein, 486 aa, Artificial Sequence
  source: /note="Description of Artificial Sequence: Synthetic Chimeric Antigen Receptor"
MALPVTALLLPLALLLHAARPDVQLTQSPSFLSASVGDRVTITCRASKSISKDLAWYQQKPGKAPKLLIYSGSTLQSGVPSRFSGSGSGTEFTLTISSLQPEDFATYYCQQHNKYPYTFGGGTKVEIKGGGGSGGGGSGGGGSGGGGSEVQLVESGGGLVQPGGSLRLSCAASGYTFTSYWMNWVRQAPGKGLVWVSRIDPYDSETHYNQKFKDRFTISVDKAKSTAYLQMNSLRAEDTAVYYCARGNWDDYWGQGTTVTVSSTTTPAPRPPTPAPTIASQPLSLRPEACRPAAGGAVHTRGLDFACDIYIWAPLAGTCGVLLLSLVITLYCKRGRKKLLYIFKQPFMRPVQTTQEEDGCSCRFPEEEEGGCELRVKFSRSADAPAYKQGQNQLYNELNLGRREEYDVLDKRRGRDPEMGGKPRRKNPQEGLYNELQKDKMAEAYSEIGMKGERRRGKGHDGLYQGLSTATKDTYDALHMQALPPR

SEQ ID NO: 7162 - protein, 486 aa, Artificial Sequence
  source: /note="Description of Artificial Sequence: Synthetic Chimeric Antigen Receptor"
MALPVTALLLPLALLLHAARPEVVLTQSPATLSLSPGERATLSCRASKSISKDLAWYQQKPGQAPRLLIYSGSTLQSGIPARFSGSGSGTDFTLTISSLEPEDFAVYYCQQHNKYPYTFGGGTKVEIKGGGGSGGGGSGGGGSGGGGSEVQLVESGGGLVQPGGSLRLSCAASGYTFTSYWMNWVRQAPGKGLVWVSRIDPYDSETHYNQKFKDRFTISVDKAKSTAYLQMNSLRAEDTAVYYCARGNWDDYWGQGTTVTVSSTTTPAPRPPTPAPTIASQPLSLRPEACRPAAGGAVHTRGLDFACDIYIWAPLAGTCGVLLLSLVITLYCKRGRKKLLYIFKQPFMRPVQTTQEEDGCSCRFPEEEEGGCELRVKFSRSADAPAYKQGQNQLYNELNLGRREEYDVLDKRRGRDPEMGGKPRRKNPQEGLYNELQKDKMAEAYSEIGMKGERRRGKGHDGLYQGLSTATKDTYDALHMQALPPR

SEQ ID NO: 7163 - protein, 486 aa, Artificial Sequence
  source: /note="Description of Artificial Sequence: Synthetic Chimeric Antigen Receptor"
MALPVTALLLPLALLLHAARPDVVMTQSPAFLSVTPGEKVTITCRASKSISKDLAWYQQKPDQAPKLLIYSGSTLQSGVPSRFSGSGSGTDFTFTISSLEAEDAATYYCQQHNKYPYTFGGGTKVEIKGGGGSGGGGSGGGGSGGGGSEVQLVESGGGLVQPGGSLRLSCAASGYTFTSYWMNWVRQAPGKGLVWVSRIDPYDSETHYNQKFKDRFTISVDKAKSTAYLQMNSLRAEDTAVYYCARGNWDDYWGQGTTVTVSSTTTPAPRPPTPAPTIASQPLSLRPEACRPAAGGAVHTRGLDFACDIYIWAPLAGTCGVLLLSLVITLYCKRGRKKLLYIFKQPFMRPVQTTQEEDGCSCRFPEEEEGGCELRVKFSRSADAPAYKQGQNQLYNELNLGRREEYDVLDKRRGRDPEMGGKPRRKNPQEGLYNELQKDKMAEAYSEIGMKGERRRGKGHDGLYQGLSTATKDTYDALHMQALPPR

SEQ ID NO: 7164 - protein, 486 aa, Artificial Sequence
  source: /note="Description of Artificial Sequence: Synthetic Chimeric Antigen Receptor"
MALPVTALLLPLALLLHAARPDVVMTQSPDSLAVSLGERATINCRASKSISKDLAWYQQKPGQPPKLLIYSGSTLQSGVPDRFSGSGSGTDFTLTISSLQAEDVAVYYCQQHNKYPYTFGGGTKVEIKGGGGSGGGGSGGGGSGGGGSEVQLVESGGGLVQPGGSLRLSCAASGYTFTSYWMNWVRQAPGKGLVWVSRIDPYDSETHYNQKFKDRFTISVDKAKSTAYLQMNSLRAEDTAVYYCARGNWDDYWGQGTTVTVSSTTTPAPRPPTPAPTIASQPLSLRPEACRPAAGGAVHTRGLDFACDIYIWAPLAGTCGVLLLSLVITLYCKRGRKKLLYIFKQPFMRPVQTTQEEDGCSCRFPEEEEGGCELRVKFSRSADAPAYKQGQNQLYNELNLGRREEYDVLDKRRGRDPEMGGKPRRKNPQEGLYNELQKDKMAEAYSEIGMKGERRRGKGHDGLYQGLSTATKDTYDALHMQALPPR

SEQ ID NO: 7165 - protein, 470 aa, Artificial Sequence
  source: /note="Description of Artificial Sequence: Synthetic Chimeric Antigen Receptor"
MALPVTALLLPLALLLHAARPEVKLVESGGGLVQPGGSLSLSCAASGFTFTDYYMSWVRQPPGKALEWLALIRSKADGYTTEYSASVKGRFTLSRDDSQSILYLQMNALRPEDSATYYCARDAAYYSYYSPEGAMDYWGQGTSVTVSSGGGGSGGGGSGGGGSMADYKDIVMTQSHKFMSTSVGDRVNITCKASQNVDSAVAWYQQKPGQSPKALIYSASYRYSGVPDRFTGRGSGTDFTLTISSVQAEDLAVYYCQQYYSTPWTFGGGTKLEIKRGLAVSTISSFFPPGYQIYIWAPLAGTCGVLLLSLVITLYCKRGRKKLLYIFKQPFMRPVQTTQEEDGCSCRFPEEEEGGCELRVKFSRSADAPAYQQGQNQLYNELNLGRREEYDVLDKRRGRDPEMGGKPRRKNPQEGLYNELQKDKMAEAYSEIGMKGERRRGKGHDGLYQGLSTATKDTYDALHMQALPPR

SEQ ID NO: 7166 - protein, 499 aa, Artificial Sequence
  source: /note="Description of Artificial Sequence: Synthetic Chimeric Antigen Receptor"
MALPVTALLLPLALLLHAARPEVKLVESGGGLVQPGGSLSLSCAASGFTFTDYYMSWVRQPPGKALEWLALIRSKADGYTTEYSASVKGRFTLSRDDSQSILYLQMNALRPEDSATYYCARDAAYYSYYSPEGAMDYWGQGTSVTVSSGGGGSGGGGSGGGGSMADYKDIVMTQSHKFMSTSVGDRVNITCKASQNVDSAVAWYQQKPGQSPKALIYSASYRYSGVPDRFTGRGSGTDFTLTISSVQAEDLAVYYCQQYYSTPWTFGGGTKLEIKRTTTPAPRPPTPAPTIASQPLSLRPEACRPAAGGAVHTRGLDFACDIYIWAPLAGTCGVLLLSLVITLYCKRGRKKLLYIFKQPFMRPVQTTQEEDGCSCRFPEEEEGGCELRVKFSRSADAPAYQQGQNQLYNELNLGRREEYDVLDKRRGRDPEMGGKPRRKNPQEGLYNELQKDKMAEAYSEIGMKGERRRGKGHDGLYQGLSTATKDTYDALHMQALPPR

SEQ ID NO: 7167 - protein, 685 aa, Artificial Sequence
  source: /note="Description of Artificial Sequence: Synthetic Chimeric Antigen Receptor"
MALPVTALLLPLALLLHAARPEVKLVESGGGLVQPGGSLSLSCAASGFTFTDYYMSWVRQPPGKALEWLALIRSKADGYTTEYSASVKGRFTLSRDDSQSILYLQMNALRPEDSATYYCARDAAYYSYYSPEGAMDYWGQGTSVTVSSGGGGSGGGGSGGGGSMADYKDIVMTQSHKFMSTSVGDRVNITCKASQNVDSAVAWYQQKPGQSPKALIYSASYRYSGVPDRFTGRGSGTDFTLTISSVQAEDLAVYYCQQYYSTPWTFGGGTKLEIKREPKSPDKTHTCPPCPAPPVAGPSVFLFPPKPKDTLMIARTPEVTCVVVDVSHEDPEVKFNWYVDGVEVHNAKTKPREEQYNSTYRVVSVLTVLHQDWLNGKEYKCKVSNKALPAPIEKTISKAKGQPREPQVYTLPPSRDELTKNQVSLTCLVKGFYPSDIAVEWESNGQPENNYKTTPPVLDSDGSFFLYSKLTVDKSRWQQGNVFSCSVMHEALHNHYTQKSLSLSPGKIYIWAPLAGTCGVLLLSLVITLYCKRGRKKLLYIFKQPFMRPVQTTQEEDGCSCRFPEEEEGGCELRVKFSRSADAPAYQQGQNQLYNELNLGRREEYDVLDKRRGRDPEMGGKPRRKNPQEGLYNELQKDKMAEAYSEIGMKGERRRGKGHDGLYQGLSTATKDTYDALHMQALPPR

SEQ ID NO: 7168 - protein, 470 aa, Artificial Sequence
  source: /note="Description of Artificial Sequence: Synthetic Chimeric Antigen Receptor"
MALPVTALLLPLALLLHAARPEVKLVESGGGLVQPGRSLRLSCTASGFTFTDYYMSWVRQAPGKGLEWVGLIRSKADGYTTEYSASVKGRFTISRDDSKSILYLQMNSLKTEDTAVYYCARDAAYYSYYSPEGAMDYWGQGTLVTVSSGGGGSGGGGSGGGGSMADYKDIVMTQSPSSVSASVGDRVTITCRASQNVDSAVAWYQQKPGKAPKALIYSASYRYSGVPSRFSGRGSGTDFTLTISSLQPEDFATYYCQQYYSTPWTFGQGTKVEIKRGLAVSTISSFFPPGYQIYIWAPLAGTCGVLLLSLVITLYCKRGRKKLLYIFKQPFMRPVQTTQEEDGCSCRFPEEEEGGCELRVKFSRSADAPAYQQGQNQLYNELNLGRREEYDVLDKRRGRDPEMGGKPRRKNPQEGLYNELQKDKMAEAYSEIGMKGERRRGKGHDGLYQGLSTATKDTYDALHMQALPPR

SEQ ID NO: 7169 - protein, 470 aa, Artificial Sequence
  source: /note="Description of Artificial Sequence: Synthetic Chimeric Antigen Receptor"
MALPVTALLLPLALLLHAARPEVKLVESGGGLVQPGRSLRLSCTASGFTFTDYYMSWVRQAPGKGLEWVGLIRSKADGYTTEYSASVKGRFTISRDDSKSILYLQMNSLKTEDTAVYYCARDAAYYSYYSPEGAMDYWGQGTLVTVSSGGGGSGGGGSGGGGSMADYKDIQMTQSPSSVSASVGDRVTITCRASQNVDSAVAWYQQKPGKAPKALIYSASYRYSGVPSRFSGRGSGTDFTLTISSLQPEDFATYYCQQYYSTPWTFGQGTKVEIKRGLAVSTISSFFPPGYQIYIWAPLAGTCGVLLLSLVITLYCKRGRKKLLYIFKQPFMRPVQTTQEEDGCSCRFPEEEEGGCELRVKFSRSADAPAYQQGQNQLYNELNLGRREEYDVLDKRRGRDPEMGGKPRRKNPQEGLYNELQKDKMAEAYSEIGMKGERRRGKGHDGLYQGLSTATKDTYDALHMQALPPR

SEQ ID NO: 7170 - protein, 470 aa, Artificial Sequence
  source: /note="Description of Artificial Sequence: Synthetic Chimeric Antigen Receptor"
MALPVTALLLPLALLLHAARPEVKLVESGGGLVQPGRSLRLSCTASGFTFTDYYMSWVRQAPGKGLEWVGLIRSKADGYTTEYSASVKGRFTISRDDSKSILYLQMNSLKTEDTAVYYCARDAAYYSYYSPEGAMDYWGQGTLVTVSSGGGGSGGGGSGGGGSMADYKDIQMTQSPSSVSASVGDRVTITCRASQNVDSAVAWYQQKPGKAPKALIYSASYRYSGVPSRFSGSGSGTDFTLTISSLQPEDFATYYCQQYYSTPWTFGQGTKVEIKRGLAVSTISSFFPPGYQIYIWAPLAGTCGVLLLSLVITLYCKRGRKKLLYIFKQPFMRPVQTTQEEDGCSCRFPEEEEGGCELRVKFSRSADAPAYQQGQNQLYNELNLGRREEYDVLDKRRGRDPEMGGKPRRKNPQEGLYNELQKDKMAEAYSEIGMKGERRRGKGHDGLYQGLSTATKDTYDALHMQALPPR

SEQ ID NO: 7171 - protein, 470 aa, Artificial Sequence
  source: /note="Description of Artificial Sequence: Synthetic Chimeric Antigen Receptor"
MALPVTALLLPLALLLHAARPEVKLVESGGGLVQPGRSLRLSCTASGFTFTDYYMSWVRQAPGKGLEWVGLIRSKADGYTTEYSASVKGRFTISRDDSKSILYLQMNSLKTEDTAVYYCARDAAYYSYYSPEGAMDYWGQGTLVTVSSGGGGSGGGGSGGGGSMADYKDIQMTQSPSSVSASVGDRVTITCRASQNVDSAVAWYQQKPGKAPKLLIYSASYRYSGVPSRFSGSGSGTDFTLTISSLQPEDFATYYCQQYYSTPWTFGQGTKVEIKRGLAVSTISSFFPPGYQIYIWAPLAGTCGVLLLSLVITLYCKRGRKKLLYIFKQPFMRPVQTTQEEDGCSCRFPEEEEGGCELRVKFSRSADAPAYQQGQNQLYNELNLGRREEYDVLDKRRGRDPEMGGKPRRKNPQEGLYNELQKDKMAEAYSEIGMKGERRRGKGHDGLYQGLSTATKDTYDALHMQALPPR

SEQ ID NO: 7172 - protein, 470 aa, Artificial Sequence
  source: /note="Description of Artificial Sequence: Synthetic Chimeric Antigen Receptor"
MALPVTALLLPLALLLHAARPEVKLVESGGGLVQPGRSLRLSCTASGFTFTDYYMSWVRQAPGKGLEWVGLIRSKADGYTTEYSASVKGRFTISRDDSKSILYLQMNSLKTEDTAVYYCARDAAYYSYYSPEGAMDYWGQGTLVTVSSGGGGSGGGGSGGGGSMADYKDIQMTQSPSSVSASVGDRVTITCRASQNVDSAVAWYQQKPGKAPKLLIYSASYRQSGVPSRFSGSGSGTDFTLTISSLQPEDFATYYCQQYYSTPWTFGQGTKVEIKRGLAVSTISSFFPPGYQIYIWAPLAGTCGVLLLSLVITLYCKRGRKKLLYIFKQPFMRPVQTTQEEDGCSCRFPEEEEGGCELRVKFSRSADAPAYQQGQNQLYNELNLGRREEYDVLDKRRGRDPEMGGKPRRKNPQEGLYNELQKDKMAEAYSEIGMKGERRRGKGHDGLYQGLSTATKDTYDALHMQALPPR

SEQ ID NO: 7173 - protein, 470 aa, Artificial Sequence
  source: /note="Description of Artificial Sequence: Synthetic Chimeric Antigen Receptor"
MALPVTALLLPLALLLHAARPEVKLVESGGGLVQPGRSLRLSCTASGFTFTDYYMSWVRQAPGKGLEWVGLIRSKADGYTTEYSASVKGRFTISRDDSKSILYLQMNSLKTEDTAVYYCARDAAYYSYYSPEGAMDYWGQGTLVTVSSGGGGSGGGGSGGGGSMADYKDIQMTQSPSSVSASVGDRVTITCRASQNVDSAVAWYQQKPGKAPKLLIYSASYGQSGVPSRFSGSGSGTDFTLTISSLQPEDFATYYCQQYYSTPWTFGQGTKVEIKRGLAVSTISSFFPPGYQIYIWAPLAGTCGVLLLSLVITLYCKRGRKKLLYIFKQPFMRPVQTTQEEDGCSCRFPEEEEGGCELRVKFSRSADAPAYQQGQNQLYNELNLGRREEYDVLDKRRGRDPEMGGKPRRKNPQEGLYNELQKDKMAEAYSEIGMKGERRRGKGHDGLYQGLSTATKDTYDALHMQALPPR

SEQ ID NO: 7174 - protein, 470 aa, Artificial Sequence
  source: /note="Description of Artificial Sequence: Synthetic Chimeric Antigen Receptor"
MALPVTALLLPLALLLHAARPEVQLVESGGGLVQPGRSLRLSCTASGFTFTDYYMSWVRQAPGKGLEWVGLIRSKADGYTTEYSASVKGRFTISRDDSKSILYLQMNSLKTEDTAVYYCARDAAYYSYYSPEGAMDYWGQGTLVTVSSGGGGSGGGGSGGGGSMADYKDIVMTQSPSSVSASVGDRVTITCRASQNVDSAVAWYQQKPGKAPKALIYSASYRYSGVPSRFSGRGSGTDFTLTISSLQPEDFATYYCQQYYSTPWTFGQGTKVEIKRGLAVSTISSFFPPGYQIYIWAPLAGTCGVLLLSLVITLYCKRGRKKLLYIFKQPFMRPVQTTQEEDGCSCRFPEEEEGGCELRVKFSRSADAPAYQQGQNQLYNELNLGRREEYDVLDKRRGRDPEMGGKPRRKNPQEGLYNELQKDKMAEAYSEIGMKGERRRGKGHDGLYQGLSTATKDTYDALHMQALPPR

SEQ ID NO: 7175 - protein, 470 aa, Artificial Sequence
  source: /note="Description of Artificial Sequence: Synthetic Chimeric Antigen Receptor"
MALPVTALLLPLALLLHAARPEVQLVESGGGLVQPGRSLRLSCTASGFTFTDYYMSWVRQAPGKGLEWVGLIRSKADGYTTEYSASVKGRFTISRDDSKSILYLQMNSLKTEDTAVYYCARDAAYYSYYSPEGAMDYWGQGTLVTVSSGGGGSGGGGSGGGGSMADYKDIQMTQSPSSVSASVGDRVTITCRASQNVDSAVAWYQQKPGKAPKALIYSASYRYSGVPSRFSGRGSGTDFTLTISSLQPEDFATYYCQQYYSTPWTFGQGTKVEIKRGLAVSTISSFFPPGYQIYIWAPLAGTCGVLLLSLVITLYCKRGRKKLLYIFKQPFMRPVQTTQEEDGCSCRFPEEEEGGCELRVKFSRSADAPAYQQGQNQLYNELNLGRREEYDVLDKRRGRDPEMGGKPRRKNPQEGLYNELQKDKMAEAYSEIGMKGERRRGKGHDGLYQGLSTATKDTYDALHMQALPPR

SEQ ID NO: 7176 - protein, 470 aa, Artificial Sequence
  source: /note="Description of Artificial Sequence: Synthetic Chimeric Antigen Receptor"
MALPVTALLLPLALLLHAARPEVQLVESGGGLVQPGRSLRLSCTASGFTFTDYYMSWVRQAPGKGLEWVGLIRSKADGYTTEYSASVKGRFTISRDDSKSILYLQMNSLKTEDTAVYYCARDAAYYSYYSPEGAMDYWGQGTLVTVSSGGGGSGGGGSGGGGSMADYKDIQMTQSPSSVSASVGDRVTITCRASQNVDSAVAWYQQKPGKAPKALIYSASYRYSGVPSRFSGSGSGTDFTLTISSLQPEDFATYYCQQYYSTPWTFGQGTKVEIKRGLAVSTISSFFPPGYQIYIWAPLAGTCGVLLLSLVITLYCKRGRKKLLYIFKQPFMRPVQTTQEEDGCSCRFPEEEEGGCELRVKFSRSADAPAYQQGQNQLYNELNLGRREEYDVLDKRRGRDPEMGGKPRRKNPQEGLYNELQKDKMAEAYSEIGMKGERRRGKGHDGLYQGLSTATKDTYDALHMQALPPR

SEQ ID NO: 7177 - protein, 470 aa, Artificial Sequence
  source: /note="Description of Artificial Sequence: Synthetic Chimeric Antigen Receptor"
MALPVTALLLPLALLLHAARPEVQLVESGGGLVQPGRSLRLSCTASGFTFTDYYMSWVRQAPGKGLEWVGLIRSKADGYTTEYSASVKGRFTISRDDSKSILYLQMNSLKTEDTAVYYCARDAAYYSYYSPEGAMDYWGQGTLVTVSSGGGGSGGGGSGGGGSMADYKDIQMTQSPSSVSASVGDRVTITCRASQNVDSAVAWYQQKPGKAPKLLIYSASYRYSGVPSRFSGSGSGTDFTLTISSLQPEDFATYYCQQYYSTPWTFGQGTKVEIKRGLAVSTISSFFPPGYQIYIWAPLAGTCGVLLLSLVITLYCKRGRKKLLYIFKQPFMRPVQTTQEEDGCSCRFPEEEEGGCELRVKFSRSADAPAYQQGQNQLYNELNLGRREEYDVLDKRRGRDPEMGGKPRRKNPQEGLYNELQKDKMAEAYSEIGMKGERRRGKGHDGLYQGLSTATKDTYDALHMQALPPR

SEQ ID NO: 7178 - protein, 470 aa, Artificial Sequence
  source: /note="Description of Artificial Sequence: Synthetic Chimeric Antigen Receptor"
MALPVTALLLPLALLLHAARPEVQLVESGGGLVQPGRSLRLSCTASGFTFTDYYMSWVRQAPGKGLEWVGLIRSKADGYTTEYSASVKGRFTISRDDSKSILYLQMNSLKTEDTAVYYCARDAAYYSYYSPEGAMDYWGQGTLVTVSSGGGGSGGGGSGGGGSMADYKDIQMTQSPSSVSASVGDRVTITCRASQNVDSAVAWYQQKPGKAPKLLIYSASYRQSGVPSRFSGSGSGTDFTLTISSLQPEDFATYYCQQYYSTPWTFGQGTKVEIKRGLAVSTISSFFPPGYQIYIWAPLAGTCGVLLLSLVITLYCKRGRKKLLYIFKQPFMRPVQTTQEEDGCSCRFPEEEEGGCELRVKFSRSADAPAYQQGQNQLYNELNLGRREEYDVLDKRRGRDPEMGGKPRRKNPQEGLYNELQKDKMAEAYSEIGMKGERRRGKGHDGLYQGLSTATKDTYDALHMQALPPR

SEQ ID NO: 7179 - protein, 470 aa, Artificial Sequence
  source: /note="Description of Artificial Sequence: Synthetic Chimeric Antigen Receptor"
MALPVTALLLPLALLLHAARPEVQLVESGGGLVQPGRSLRLSCTASGFTFTDYYMSWVRQAPGKGLEWVGLIRSKADGYTTEYSASVKGRFTISRDDSKSILYLQMNSLKTEDTAVYYCARDAAYYSYYSPEGAMDYWGQGTLVTVSSGGGGSGGGGSGGGGSMADYKDIQMTQSPSSVSASVGDRVTITCRASQNVDSAVAWYQQKPGKAPKLLIYSASYGQSGVPSRFSGSGSGTDFTLTISSLQPEDFATYYCQQYYSTPWTFGQGTKVEIKRGLAVSTISSFFPPGYQIYIWAPLAGTCGVLLLSLVITLYCKRGRKKLLYIFKQPFMRPVQTTQEEDGCSCRFPEEEEGGCELRVKFSRSADAPAYQQGQNQLYNELNLGRREEYDVLDKRRGRDPEMGGKPRRKNPQEGLYNELQKDKMAEAYSEIGMKGERRRGKGHDGLYQGLSTATKDTYDALHMQALPPR

SEQ ID NO: 7180 - protein, 470 aa, Artificial Sequence
  source: /note="Description of Artificial Sequence: Synthetic Chimeric Antigen Receptor"
MALPVTALLLPLALLLHAARPEVQLVESGGGLVQPGRSLRLSCTASGFTFTDYYMSWVRQAPGKGLEWVGLIRSKADGYTTEYSASVKGRFTISRDDSKSIAYLQMNSLKTEDTAVYYCARDAAYYSYYSPEGAMDYWGQGTLVTVSSGGGGSGGGGSGGGGSMADYKDIVMTQSPSSVSASVGDRVTITCRASQNVDSAVAWYQQKPGKAPKALIYSASYRYSGVPSRFSGRGSGTDFTLTISSLQPEDFATYYCQQYYSTPWTFGQGTKVEIKRGLAVSTISSFFPPGYQIYIWAPLAGTCGVLLLSLVITLYCKRGRKKLLYIFKQPFMRPVQTTQEEDGCSCRFPEEEEGGCELRVKFSRSADAPAYQQGQNQLYNELNLGRREEYDVLDKRRGRDPEMGGKPRRKNPQEGLYNELQKDKMAEAYSEIGMKGERRRGKGHDGLYQGLSTATKDTYDALHMQALPPR

SEQ ID NO: 7181 - protein, 470 aa, Artificial Sequence
  source: /note="Description of Artificial Sequence: Synthetic Chimeric Antigen Receptor"
MALPVTALLLPLALLLHAARPEVQLVESGGGLVQPGRSLRLSCTASGFTFTDYYMSWVRQAPGKGLEWVGLIRSKADGYTTEYSASVKGRFTISRDDSKSIAYLQMNSLKTEDTAVYYCARDAAYYSYYSPEGAMDYWGQGTLVTVSSGGGGSGGGGSGGGGSMADYKDIQMTQSPSSVSASVGDRVTITCRASQNVDSAVAWYQQKPGKAPKALIYSASYRYSGVPSRFSGRGSGTDFTLTISSLQPEDFATYYCQQYYSTPWTFGQGTKVEIKRGLAVSTISSFFPPGYQIYIWAPLAGTCGVLLLSLVITLYCKRGRKKLLYIFKQPFMRPVQTTQEEDGCSCRFPEEEEGGCELRVKFSRSADAPAYQQGQNQLYNELNLGRREEYDVLDKRRGRDPEMGGKPRRKNPQEGLYNELQKDKMAEAYSEIGMKGERRRGKGHDGLYQGLSTATKDTYDALHMQALPPR

SEQ ID NO: 7182 - protein, 470 aa, Artificial Sequence
  source: /note="Description of Artificial Sequence: Synthetic Chimeric Antigen Receptor"
MALPVTALLLPLALLLHAARPEVQLVESGGGLVQPGRSLRLSCTASGFTFTDYYMSWVRQAPGKGLEWVGLIRSKADGYTTEYSASVKGRFTISRDDSKSIAYLQMNSLKTEDTAVYYCARDAAYYSYYSPEGAMDYWGQGTLVTVSSGGGGSGGGGSGGGGSMADYKDIQMTQSPSSVSASVGDRVTITCRASQNVDSAVAWYQQKPGKAPKALIYSASYRYSGVPSRFSGSGSGTDFTLTISSLQPEDFATYYCQQYYSTPWTFGQGTKVEIKRGLAVSTISSFFPPGYQIYIWAPLAGTCGVLLLSLVITLYCKRGRKKLLYIFKQPFMRPVQTTQEEDGCSCRFPEEEEGGCELRVKFSRSADAPAYQQGQNQLYNELNLGRREEYDVLDKRRGRDPEMGGKPRRKNPQEGLYNELQKDKMAEAYSEIGMKGERRRGKGHDGLYQGLSTATKDTYDALHMQALPPR

SEQ ID NO: 7183 - protein, 470 aa, Artificial Sequence
  source: /note="Description of Artificial Sequence: Synthetic Chimeric Antigen Receptor"
MALPVTALLLPLALLLHAARPEVQLVESGGGLVQPGRSLRLSCTASGFTFTDYYMSWVRQAPGKGLEWVGLIRSKADGYTTEYSASVKGRFTISRDDSKSIAYLQMNSLKTEDTAVYYCARDAAYYSYYSPEGAMDYWGQGTLVTVSSGGGGSGGGGSGGGGSMADYKDIQMTQSPSSVSASVGDRVTITCRASQNVDSAVAWYQQKPGKAPKLLIYSASYRYSGVPSRFSGSGSGTDFTLTISSLQPEDFATYYCQQYYSTPWTFGQGTKVEIKRGLAVSTISSFFPPGYQIYIWAPLAGTCGVLLLSLVITLYCKRGRKKLLYIFKQPFMRPVQTTQEEDGCSCRFPEEEEGGCELRVKFSRSADAPAYQQGQNQLYNELNLGRREEYDVLDKRRGRDPEMGGKPRRKNPQEGLYNELQKDKMAEAYSEIGMKGERRRGKGHDGLYQGLSTATKDTYDALHMQALPPR

SEQ ID NO: 7184 - protein, 470 aa, Artificial Sequence
  source: /note="Description of Artificial Sequence: Synthetic Chimeric Antigen Receptor"
MALPVTALLLPLALLLHAARPEVQLVESGGGLVQPGRSLRLSCTASGFTFTDYYMSWVRQAPGKGLEWVGLIRSKADGYTTEYSASVKGRFTISRDDSKSIAYLQMNSLKTEDTAVYYCARDAAYYSYYSPEGAMDYWGQGTLVTVSSGGGGSGGGGSGGGGSMADYKDIQMTQSPSSVSASVGDRVTITCRASQNVDSAVAWYQQKPGKAPKLLIYSASYRQSGVPSRFSGSGSGTDFTLTISSLQPEDFATYYCQQYYSTPWTFGQGTKVEIKRGLAVSTISSFFPPGYQIYIWAPLAGTCGVLLLSLVITLYCKRGRKKLLYIFKQPFMRPVQTTQEEDGCSCRFPEEEEGGCELRVKFSRSADAPAYQQGQNQLYNELNLGRREEYDVLDKRRGRDPEMGGKPRRKNPQEGLYNELQKDKMAEAYSEIGMKGERRRGKGHDGLYQGLSTATKDTYDALHMQALPPR

SEQ ID NO: 7185 - protein, 470 aa, Artificial Sequence
  source: /note="Description of Artificial Sequence: Synthetic Chimeric Antigen Receptor"
MALPVTALLLPLALLLHAARPEVQLVESGGGLVQPGRSLRLSCTASGFTFTDYYMSWVRQAPGKGLEWVGLIRSKADGYTTEYSASVKGRFTISRDDSKSIAYLQMNSLKTEDTAVYYCARDAAYYSYYSPEGAMDYWGQGTLVTVSSGGGGSGGGGSGGGGSMADYKDIQMTQSPSSVSASVGDRVTITCRASQNVDSAVAWYQQKPGKAPKLLIYSASYGQSGVPSRFSGSGSGTDFTLTISSLQPEDFATYYCQQYYSTPWTFGQGTKVEIKRGLAVSTISSFFPPGYQIYIWAPLAGTCGVLLLSLVITLYCKRGRKKLLYIFKQPFMRPVQTTQEEDGCSCRFPEEEEGGCELRVKFSRSADAPAYQQGQNQLYNELNLGRREEYDVLDKRRGRDPEMGGKPRRKNPQEGLYNELQKDKMAEAYSEIGMKGERRRGKGHDGLYQGLSTATKDTYDALHMQALPPR

SEQ ID NO: 7186 - protein, 470 aa, Artificial Sequence
  source: /note="Description of Artificial Sequence: Synthetic Chimeric Antigen Receptor"
MALPVTALLLPLALLLHAARPEVQLVESGGGLVQPGRSLRLSCTASGFTFTDYYMSWVRQAPGKGLEWVGFIRSKADGYTTEYSASVKGRFTISRDDSKSIAYLQMNSLKTEDTAVYYCARDAAYYSYYSPEGAMDYWGQGTLVTVSSGGGGSGGGGSGGGGSMADYKDIVMTQSPSSVSASVGDRVTITCRASQNVDSAVAWYQQKPGKAPKALIYSASYRYSGVPSRFSGRGSGTDFTLTISSLQPEDFATYYCQQYYSTPWTFGQGTKVEIKRGLAVSTISSFFPPGYQIYIWAPLAGTCGVLLLSLVITLYCKRGRKKLLYIFKQPFMRPVQTTQEEDGCSCRFPEEEEGGCELRVKFSRSADAPAYQQGQNQLYNELNLGRREEYDVLDKRRGRDPEMGGKPRRKNPQEGLYNELQKDKMAEAYSEIGMKGERRRGKGHDGLYQGLSTATKDTYDALHMQALPPR

SEQ ID NO: 7187 - protein, 470 aa, Artificial Sequence
  source: /note="Description of Artificial Sequence: Synthetic Chimeric Antigen Receptor"
MALPVTALLLPLALLLHAARPEVQLVESGGGLVQPGRSLRLSCTASGFTFTDYYMSWVRQAPGKGLEWVGFIRSKADGYTTEYSASVKGRFTISRDDSKSIAYLQMNSLKTEDTAVYYCARDAAYYSYYSPEGAMDYWGQGTLVTVSSGGGGSGGGGSGGGGSMADYKDIQMTQSPSSVSASVGDRVTITCRASQNVDSAVAWYQQKPGKAPKALIYSASYRYSGVPSRFSGRGSGTDFTLTISSLQPEDFATYYCQQYYSTPWTFGQGTKVEIKRGLAVSTISSFFPPGYQIYIWAPLAGTCGVLLLSLVITLYCKRGRKKLLYIFKQPFMRPVQTTQEEDGCSCRFPEEEEGGCELRVKFSRSADAPAYQQGQNQLYNELNLGRREEYDVLDKRRGRDPEMGGKPRRKNPQEGLYNELQKDKMAEAYSEIGMKGERRRGKGHDGLYQGLSTATKDTYDALHMQALPPR

SEQ ID NO: 7188 - protein, 470 aa, Artificial Sequence
  source: /note="Description of Artificial Sequence: Synthetic Chimeric Antigen Receptor"
MALPVTALLLPLALLLHAARPEVQLVESGGGLVQPGRSLRLSCTASGFTFTDYYMSWVRQAPGKGLEWVGFIRSKADGYTTEYSASVKGRFTISRDDSKSIAYLQMNSLKTEDTAVYYCARDAAYYSYYSPEGAMDYWGQGTLVTVSSGGGGSGGGGSGGGGSMADYKDIQMTQSPSSVSASVGDRVTITCRASQNVDSAVAWYQQKPGKAPKALIYSASYRYSGVPSRFSGSGSGTDFTLTISSLQPEDFATYYCQQYYSTPWTFGQGTKVEIKRGLAVSTISSFFPPGYQIYIWAPLAGTCGVLLLSLVITLYCKRGRKKLLYIFKQPFMRPVQTTQEEDGCSCRFPEEEEGGCELRVKFSRSADAPAYQQGQNQLYNELNLGRREEYDVLDKRRGRDPEMGGKPRRKNPQEGLYNELQKDKMAEAYSEIGMKGERRRGKGHDGLYQGLSTATKDTYDALHMQALPPR

SEQ ID NO: 7189 - protein, 470 aa, Artificial Sequence
  source: /note="Description of Artificial Sequence: Synthetic Chimeric Antigen Receptor"
MALPVTALLLPLALLLHAARPEVQLVESGGGLVQPGRSLRLSCTASGFTFTDYYMSWVRQAPGKGLEWVGFIRSKADGYTTEYSASVKGRFTISRDDSKSIAYLQMNSLKTEDTAVYYCARDAAYYSYYSPEGAMDYWGQGTLVTVSSGGGGSGGGGSGGGGSMADYKDIQMTQSPSSVSASVGDRVTITCRASQNVDSAVAWYQQKPGKAPKLLIYSASYRYSGVPSRFSGSGSGTDFTLTISSLQPEDFATYYCQQYYSTPWTFGQGTKVEIKRGLAVSTISSFFPPGYQIYIWAPLAGTCGVLLLSLVITLYCKRGRKKLLYIFKQPFMRPVQTTQEEDGCSCRFPEEEEGGCELRVKFSRSADAPAYQQGQNQLYNELNLGRREEYDVLDKRRGRDPEMGGKPRRKNPQEGLYNELQKDKMAEAYSEIGMKGERRRGKGHDGLYQGLSTATKDTYDALHMQALPPR

SEQ ID NO: 7190 - protein, 470 aa, Artificial Sequence
  source: /note="Description of Artificial Sequence: Synthetic Chimeric Antigen Receptor"
MALPVTALLLPLALLLHAARPEVQLVESGGGLVQPGRSLRLSCTASGFTFTDYYMSWVRQAPGKGLEWVGFIRSKADGYTTEYSASVKGRFTISRDDSKSIAYLQMNSLKTEDTAVYYCARDAAYYSYYSPEGAMDYWGQGTLVTVSSGGGGSGGGGSGGGGSMADYKDIQMTQSPSSVSASVGDRVTITCRASQNVDSAVAWYQQKPGKAPKLLIYSASYRQSGVPSRFSGSGSGTDFTLTISSLQPEDFATYYCQQYYSTPWTFGQGTKVEIKRGLAVSTISSFFPPGYQIYIWAPLAGTCGVLLLSLVITLYCKRGRKKLLYIFKQPFMRPVQTTQEEDGCSCRFPEEEEGGCELRVKFSRSADAPAYQQGQNQLYNELNLGRREEYDVLDKRRGRDPEMGGKPRRKNPQEGLYNELQKDKMAEAYSEIGMKGERRRGKGHDGLYQGLSTATKDTYDALHMQALPPR

SEQ ID NO: 7191 - protein, 470 aa, Artificial Sequence
  source: /note="Description of Artificial Sequence: Synthetic Chimeric Antigen Receptor"
MALPVTALLLPLALLLHAARPEVQLVESGGGLVQPGRSLRLSCTASGFTFTDYYMSWVRQAPGKGLEWVGFIRSKADGYTTEYSASVKGRFTISRDDSKSIAYLQMNSLKTEDTAVYYCARDAAYYSYYSPEGAMDYWGQGTLVTVSSGGGGSGGGGSGGGGSMADYKDIQMTQSPSSVSASVGDRVTITCRASQNVDSAVAWYQQKPGKAPKLLIYSASYGQSGVPSRFSGSGSGTDFTLTISSLQPEDFATYYCQQYYSTPWTFGQGTKVEIKRGLAVSTISSFFPPGYQIYIWAPLAGTCGVLLLSLVITLYCKRGRKKLLYIFKQPFMRPVQTTQEEDGCSCRFPEEEEGGCELRVKFSRSADAPAYQQGQNQLYNELNLGRREEYDVLDKRRGRDPEMGGKPRRKNPQEGLYNELQKDKMAEAYSEIGMKGERRRGKGHDGLYQGLSTATKDTYDALHMQALPPR

SEQ ID NO: 7192 - protein, 470 aa, Artificial Sequence
  source: /note="Description of Artificial Sequence: Synthetic Chimeric Antigen Receptor"
MALPVTALLLPLALLLHAARPEVQLVESGGGLVQPGRSLRLSCTASGFTFTDYYMSWVRQAPGKGLEWVGFIRSKADGYTTEYAASVKGRFTISRDDSKSIAYLQMNSLKTEDTAVYYCARDAAYYSYYSPEGAMDYWGQGTLVTVSSGGGGSGGGGSGGGGSMADYKDIVMTQSPSSVSASVGDRVTITCRASQNVDSAVAWYQQKPGKAPKALIYSASYRYSGVPSRFSGRGSGTDFTLTISSLQPEDFATYYCQQYYSTPWTFGQGTKVEIKRGLAVSTISSFFPPGYQIYIWAPLAGTCGVLLLSLVITLYCKRGRKKLLYIFKQPFMRPVQTTQEEDGCSCRFPEEEEGGCELRVKFSRSADAPAYQQGQNQLYNELNLGRREEYDVLDKRRGRDPEMGGKPRRKNPQEGLYNELQKDKMAEAYSEIGMKGERRRGKGHDGLYQGLSTATKDTYDALHMQALPPR

SEQ ID NO: 7193 - protein, 470 aa, Artificial Sequence
  source: /note="Description of Artificial Sequence: Synthetic Chimeric Antigen Receptor"
MALPVTALLLPLALLLHAARPEVQLVESGGGLVQPGRSLRLSCTASGFTFTDYYMSWVRQAPGKGLEWVGFIRSKADGYTTEYAASVKGRFTISRDDSKSIAYLQMNSLKTEDTAVYYCARDAAYYSYYSPEGAMDYWGQGTLVTVSSGGGGSGGGGSGGGGSMADYKDIQMTQSPSSVSASVGDRVTITCRASQNVDSAVAWYQQKPGKAPKALIYSASYRYSGVPSRFSGRGSGTDFTLTISSLQPEDFATYYCQQYYSTPWTFGQGTKVEIKRGLAVSTISSFFPPGYQIYIWAPLAGTCGVLLLSLVITLYCKRGRKKLLYIFKQPFMRPVQTTQEEDGCSCRFPEEEEGGCELRVKFSRSADAPAYQQGQNQLYNELNLGRREEYDVLDKRRGRDPEMGGKPRRKNPQEGLYNELQKDKMAEAYSEIGMKGERRRGKGHDGLYQGLSTATKDTYDALHMQALPPR

SEQ ID NO: 7194 - protein, 470 aa, Artificial Sequence
  source: /note="Description of Artificial Sequence: Synthetic Chimeric Antigen Receptor"
MALPVTALLLPLALLLHAARPEVQLVESGGGLVQPGRSLRLSCTASGFTFTDYYMSWVRQAPGKGLEWVGFIRSKADGYTTEYAASVKGRFTISRDDSKSIAYLQMNSLKTEDTAVYYCARDAAYYSYYSPEGAMDYWGQGTLVTVSSGGGGSGGGGSGGGGSMADYKDIQMTQSPSSVSASVGDRVTITCRASQNVDSAVAWYQQKPGKAPKALIYSASYRYSGVPSRFSGSGSGTDFTLTISSLQPEDFATYYCQQYYSTPWTFGQGTKVEIKRGLAVSTISSFFPPGYQIYIWAPLAGTCGVLLLSLVITLYCKRGRKKLLYIFKQPFMRPVQTTQEEDGCSCRFPEEEEGGCELRVKFSRSADAPAYQQGQNQLYNELNLGRREEYDVLDKRRGRDPEMGGKPRRKNPQEGLYNELQKDKMAEAYSEIGMKGERRRGKGHDGLYQGLSTATKDTYDALHMQALPPR

SEQ ID NO: 7195 - protein, 470 aa, Artificial Sequence
  source: /note="Description of Artificial Sequence: Synthetic Chimeric Antigen Receptor"
MALPVTALLLPLALLLHAARPEVQLVESGGGLVQPGRSLRLSCTASGFTFTDYYMSWVRQAPGKGLEWVGFIRSKADGYTTEYAASVKGRFTISRDDSKSIAYLQMNSLKTEDTAVYYCARDAAYYSYYSPEGAMDYWGQGTLVTVSSGGGGSGGGGSGGGGSMADYKDIQMTQSPSSVSASVGDRVTITCRASQNVDSAVAWYQQKPGKAPKLLIYSASYRYSGVPSRFSGSGSGTDFTLTISSLQPEDFATYYCQQYYSTPWTFGQGTKVEIKRGLAVSTISSFFPPGYQIYIWAPLAGTCGVLLLSLVITLYCKRGRKKLLYIFKQPFMRPVQTTQEEDGCSCRFPEEEEGGCELRVKFSRSADAPAYQQGQNQLYNELNLGRREEYDVLDKRRGRDPEMGGKPRRKNPQEGLYNELQKDKMAEAYSEIGMKGERRRGKGHDGLYQGLSTATKDTYDALHMQALPPR

SEQ ID NO: 7196 - protein, 470 aa, Artificial Sequence
  source: /note="Description of Artificial Sequence: Synthetic Chimeric Antigen Receptor"
MALPVTALLLPLALLLHAARPEVQLVESGGGLVQPGRSLRLSCTASGFTFTDYYMSWVRQAPGKGLEWVGFIRSKADGYTTEYAASVKGRFTISRDDSKSIAYLQMNSLKTEDTAVYYCARDAAYYSYYSPEGAMDYWGQGTLVTVSSGGGGSGGGGSGGGGSMADYKDIQMTQSPSSVSASVGDRVTITCRASQNVDSAVAWYQQKPGKAPKLLIYSASYRQSGVPSRFSGSGSGTDFTLTISSLQPEDFATYYCQQYYSTPWTFGQGTKVEIKRGLAVSTISSFFPPGYQIYIWAPLAGTCGVLLLSLVITLYCKRGRKKLLYIFKQPFMRPVQTTQEEDGCSCRFPEEEEGGCELRVKFSRSADAPAYQQGQNQLYNELNLGRREEYDVLDKRRGRDPEMGGKPRRKNPQEGLYNELQKDKMAEAYSEIGMKGERRRGKGHDGLYQGLSTATKDTYDALHMQALPPR

SEQ ID NO: 7197 - protein, 470 aa, Artificial Sequence
  source: /note="Description of Artificial Sequence: Synthetic Chimeric Antigen Receptor"
MALPVTALLLPLALLLHAARPEVQLVESGGGLVQPGRSLRLSCTASGFTFTDYYMSWVRQAPGKGLEWVGFIRSKADGYTTEYAASVKGRFTISRDDSKSIAYLQMNSLKTEDTAVYYCARDAAYYSYYSPEGAMDYWGQGTLVTVSSGGGGSGGGGSGGGGSMADYKDIQMTQSPSSVSASVGDRVTITCRASQNVDSAVAWYQQKPGKAPKLLIYSASYGQSGVPSRFSGSGSGTDFTLTISSLQPEDFATYYCQQYYSTPWTFGQGTKVEIKRGLAVSTISSFFPPGYQIYIWAPLAGTCGVLLLSLVITLYCKRGRKKLLYIFKQPFMRPVQTTQEEDGCSCRFPEEEEGGCELRVKFSRSADAPAYQQGQNQLYNELNLGRREEYDVLDKRRGRDPEMGGKPRRKNPQEGLYNELQKDKMAEAYSEIGMKGERRRGKGHDGLYQGLSTATKDTYDALHMQALPPR

SEQ ID NO: 7198 - protein, 470 aa, Artificial Sequence
  source: /note="Description of Artificial Sequence: Synthetic Chimeric Antigen Receptor"
MALPVTALLLPLALLLHAARPEVQLVESGGGLVQPGRSLRLSCTASGFTFTDYYMSWVRQAPGKGLEWVGLIRSKADGYTTEYAASVKGRFTISRDDSKSIAYLQMNSLKTEDTAVYYCARDAAYYSYYSPEGAMDYWGQGTLVTVSSGGGGSGGGGSGGGGSMADYKDIVMTQSPSSVSASVGDRVTITCRASQNVDSAVAWYQQKPGKAPKALIYSASYRYSGVPSRFSGRGSGTDFTLTISSLQPEDFATYYCQQYYSTPWTFGQGTKVEIKRGLAVSTISSFFPPGYQIYIWAPLAGTCGVLLLSLVITLYCKRGRKKLLYIFKQPFMRPVQTTQEEDGCSCRFPEEEEGGCELRVKFSRSADAPAYQQGQNQLYNELNLGRREEYDVLDKRRGRDPEMGGKPRRKNPQEGLYNELQKDKMAEAYSEIGMKGERRRGKGHDGLYQGLSTATKDTYDALHMQALPPR

SEQ ID NO: 7199 - protein, 470 aa, Artificial Sequence
  source: /note="Description of Artificial Sequence: Synthetic Chimeric Antigen Receptor"
MALPVTALLLPLALLLHAARPEVQLVESGGGLVQPGRSLRLSCTASGFTFTDYYMSWVRQAPGKGLEWVGLIRSKADGYTTEYAASVKGRFTISRDDSKSIAYLQMNSLKTEDTAVYYCARDAAYYSYYSPEGAMDYWGQGTLVTVSSGGGGSGGGGSGGGGSMADYKDIQMTQSPSSVSASVGDRVTITCRASQNVDSAVAWYQQKPGKAPKALIYSASYRYSGVPSRFSGRGSGTDFTLTISSLQPEDFATYYCQQYYSTPWTFGQGTKVEIKRGLAVSTISSFFPPGYQIYIWAPLAGTCGVLLLSLVITLYCKRGRKKLLYIFKQPFMRPVQTTQEEDGCSCRFPEEEEGGCELRVKFSRSADAPAYQQGQNQLYNELNLGRREEYDVLDKRRGRDPEMGGKPRRKNPQEGLYNELQKDKMAEAYSEIGMKGERRRGKGHDGLYQGLSTATKDTYDALHMQALPPR

SEQ ID NO: 7200 - protein, 470 aa, Artificial Sequence
  source: /note="Description of Artificial Sequence: Synthetic Chimeric Antigen Receptor"
MALPVTALLLPLALLLHAARPEVQLVESGGGLVQPGRSLRLSCTASGFTFTDYYMSWVRQAPGKGLEWVGLIRSKADGYTTEYAASVKGRFTISRDDSKSIAYLQMNSLKTEDTAVYYCARDAAYYSYYSPEGAMDYWGQGTLVTVSSGGGGSGGGGSGGGGSMADYKDIQMTQSPSSVSASVGDRVTITCRASQNVDSAVAWYQQKPGKAPKALIYSASYRYSGVPSRFSGSGSGTDFTLTISSLQPEDFATYYCQQYYSTPWTFGQGTKVEIKRGLAVSTISSFFPPGYQIYIWAPLAGTCGVLLLSLVITLYCKRGRKKLLYIFKQPFMRPVQTTQEEDGCSCRFPEEEEGGCELRVKFSRSADAPAYQQGQNQLYNELNLGRREEYDVLDKRRGRDPEMGGKPRRKNPQEGLYNELQKDKMAEAYSEIGMKGERRRGKGHDGLYQGLSTATKDTYDALHMQALPPR

SEQ ID NO: 7201 - protein, 470 aa, Artificial Sequence
  source: /note="Description of Artificial Sequence: Synthetic Chimeric Antigen Receptor"
MALPVTALLLPLALLLHAARPEVQLVESGGGLVQPGRSLRLSCTASGFTFTDYYMSWVRQAPGKGLEWVGLIRSKADGYTTEYAASVKGRFTISRDDSKSIAYLQMNSLKTEDTAVYYCARDAAYYSYYSPEGAMDYWGQGTLVTVSSGGGGSGGGGSGGGGSMADYKDIQMTQSPSSVSASVGDRVTITCRASQNVDSAVAWYQQKPGKAPKLLIYSASYRYSGVPSRFSGSGSGTDFTLTISSLQPEDFATYYCQQYYSTPWTFGQGTKVEIKRGLAVSTISSFFPPGYQIYIWAPLAGTCGVLLLSLVITLYCKRGRKKLLYIFKQPFMRPVQTTQEEDGCSCRFPEEEEGGCELRVKFSRSADAPAYQQGQNQLYNELNLGRREEYDVLDKRRGRDPEMGGKPRRKNPQEGLYNELQKDKMAEAYSEIGMKGERRRGKGHDGLYQGLSTATKDTYDALHMQALPPR

SEQ ID NO: 7202 - protein, 470 aa, Artificial Sequence
  source: /note="Description of Artificial Sequence: Synthetic Chimeric Antigen Receptor"
MALPVTALLLPLALLLHAARPEVQLVESGGGLVQPGRSLRLSCTASGFTFTDYYMSWVRQAPGKGLEWVGLIRSKADGYTTEYAASVKGRFTISRDDSKSIAYLQMNSLKTEDTAVYYCARDAAYYSYYSPEGAMDYWGQGTLVTVSSGGGGSGGGGSGGGGSMADYKDIQMTQSPSSVSASVGDRVTITCRASQNVDSAVAWYQQKPGKAPKLLIYSASYRQSGVPSRFSGSGSGTDFTLTISSLQPEDFATYYCQQYYSTPWTFGQGTKVEIKRGLAVSTISSFFPPGYQIYIWAPLAGTCGVLLLSLVITLYCKRGRKKLLYIFKQPFMRPVQTTQEEDGCSCRFPEEEEGGCELRVKFSRSADAPAYQQGQNQLYNELNLGRREEYDVLDKRRGRDPEMGGKPRRKNPQEGLYNELQKDKMAEAYSEIGMKGERRRGKGHDGLYQGLSTATKDTYDALHMQALPPR

SEQ ID NO: 7203 - protein, 470 aa, Artificial Sequence
  source: /note="Description of Artificial Sequence: Synthetic Chimeric Antigen Receptor"
MALPVTALLLPLALLLHAARPEVQLVESGGGLVQPGRSLRLSCTASGFTFTDYYMSWVRQAPGKGLEWVGLIRSKADGYTTEYAASVKGRFTISRDDSKSIAYLQMNSLKTEDTAVYYCARDAAYYSYYSPEGAMDYWGQGTLVTVSSGGGGSGGGGSGGGGSMADYKDIQMTQSPSSVSASVGDRVTITCRASQNVDSAVAWYQQKPGKAPKLLIYSASYGQSGVPSRFSGSGSGTDFTLTISSLQPEDFATYYCQQYYSTPWTFGQGTKVEIKRGLAVSTISSFFPPGYQIYIWAPLAGTCGVLLLSLVITLYCKRGRKKLLYIFKQPFMRPVQTTQEEDGCSCRFPEEEEGGCELRVKFSRSADAPAYQQGQNQLYNELNLGRREEYDVLDKRRGRDPEMGGKPRRKNPQEGLYNELQKDKMAEAYSEIGMKGERRRGKGHDGLYQGLSTATKDTYDALHMQALPPR

SEQ ID NO: 7204 - protein, 470 aa, Artificial Sequence
  source: /note="Description of Artificial Sequence: Synthetic Chimeric Antigen Receptor"
MALPVTALLLPLALLLHAARPEVQLVESGGGLVQPGRSLRLSCTASGFTFTDYYMSWVRQAPGKGLEWVGFIRSKADGYTTEYAASVKGRFTISRDDSKSIAYLQMNSLKTEDTAVYYCTRDAAYYSYYSPEGAMDYWGQGTLVTVSSGGGGSGGGGSGGGGSMADYKDIVMTQSPSSVSASVGDRVTITCRASQNVDSAVAWYQQKPGKAPKALIYSASYRYSGVPSRFSGRGSGTDFTLTISSLQPEDFATYYCQQYYSTPWTFGQGTKVEIKRGLAVSTISSFFPPGYQIYIWAPLAGTCGVLLLSLVITLYCKRGRKKLLYIFKQPFMRPVQTTQEEDGCSCRFPEEEEGGCELRVKFSRSADAPAYQQGQNQLYNELNLGRREEYDVLDKRRGRDPEMGGKPRRKNPQEGLYNELQKDKMAEAYSEIGMKGERRRGKGHDGLYQGLSTATKDTYDALHMQALPPR

SEQ ID NO: 7205 - protein, 470 aa, Artificial Sequence
  source: /note="Description of Artificial Sequence: Synthetic Chimeric Antigen Receptor"
MALPVTALLLPLALLLHAARPEVQLVESGGGLVQPGRSLRLSCTASGFTFTDYYMSWVRQAPGKGLEWVGFIRSKADGYTTEYAASVKGRFTISRDDSKSIAYLQMNSLKTEDTAVYYCTRDAAYYSYYSPEGAMDYWGQGTLVTVSSGGGGSGGGGSGGGGSMADYKDIQMTQSPSSVSASVGDRVTITCRASQNVDSAVAWYQQKPGKAPKALIYSASYRYSGVPSRFSGRGSGTDFTLTISSLQPEDFATYYCQQYYSTPWTFGQGTKVEIKRGLAVSTISSFFPPGYQIYIWAPLAGTCGVLLLSLVITLYCKRGRKKLLYIFKQPFMRPVQTTQEEDGCSCRFPEEEEGGCELRVKFSRSADAPAYQQGQNQLYNELNLGRREEYDVLDKRRGRDPEMGGKPRRKNPQEGLYNELQKDKMAEAYSEIGMKGERRRGKGHDGLYQGLSTATKDTYDALHMQALPPR

SEQ ID NO: 7206 - protein, 470 aa, Artificial Sequence
  source: /note="Description of Artificial Sequence: Synthetic Chimeric Antigen Receptor"
MALPVTALLLPLALLLHAARPEVQLVESGGGLVQPGRSLRLSCTASGFTFTDYYMSWVRQAPGKGLEWVGFIRSKADGYTTEYAASVKGRFTISRDDSKSIAYLQMNSLKTEDTAVYYCTRDAAYYSYYSPEGAMDYWGQGTLVTVSSGGGGSGGGGSGGGGSMADYKDIQMTQSPSSVSASVGDRVTITCRASQNVDSAVAWYQQKPGKAPKALIYSASYRYSGVPSRFSGSGSGTDFTLTISSLQPEDFATYYCQQYYSTPWTFGQGTKVEIKRGLAVSTISSFFPPGYQIYIWAPLAGTCGVLLLSLVITLYCKRGRKKLLYIFKQPFMRPVQTTQEEDGCSCRFPEEEEGGCELRVKFSRSADAPAYQQGQNQLYNELNLGRREEYDVLDKRRGRDPEMGGKPRRKNPQEGLYNELQKDKMAEAYSEIGMKGERRRGKGHDGLYQGLSTATKDTYDALHMQALPPR

SEQ ID NO: 7207 - protein, 470 aa, Artificial Sequence
  source: /note="Description of Artificial Sequence: Synthetic Chimeric Antigen Receptor"
MALPVTALLLPLALLLHAARPEVQLVESGGGLVQPGRSLRLSCTASGFTFTDYYMSWVRQAPGKGLEWVGFIRSKADGYTTEYAASVKGRFTISRDDSKSIAYLQMNSLKTEDTAVYYCTRDAAYYSYYSPEGAMDYWGQGTLVTVSSGGGGSGGGGSGGGGSMADYKDIQMTQSPSSVSASVGDRVTITCRASQNVDSAVAWYQQKPGKAPKLLIYSASYRYSGVPSRFSGSGSGTDFTLTISSLQPEDFATYYCQQYYSTPWTFGQGTKVEIKRGLAVSTISSFFPPGYQIYIWAPLAGTCGVLLLSLVITLYCKRGRKKLLYIFKQPFMRPVQTTQEEDGCSCRFPEEEEGGCELRVKFSRSADAPAYQQGQNQLYNELNLGRREEYDVLDKRRGRDPEMGGKPRRKNPQEGLYNELQKDKMAEAYSEIGMKGERRRGKGHDGLYQGLSTATKDTYDALHMQALPPR

SEQ ID NO: 7208 - protein, 470 aa, Artificial Sequence
  source: /note="Description of Artificial Sequence: Synthetic Chimeric Antigen Receptor"
MALPVTALLLPLALLLHAARPEVQLVESGGGLVQPGRSLRLSCTASGFTFTDYYMSWVRQAPGKGLEWVGFIRSKADGYTTEYAASVKGRFTISRDDSKSIAYLQMNSLKTEDTAVYYCTRDAAYYSYYSPEGAMDYWGQGTLVTVSSGGGGSGGGGSGGGGSMADYKDIQMTQSPSSVSASVGDRVTITCRASQNVDSAVAWYQQKPGKAPKLLIYSASYRQSGVPSRFSGSGSGTDFTLTISSLQPEDFATYYCQQYYSTPWTFGQGTKVEIKRGLAVSTISSFFPPGYQIYIWAPLAGTCGVLLLSLVITLYCKRGRKKLLYIFKQPFMRPVQTTQEEDGCSCRFPEEEEGGCELRVKFSRSADAPAYQQGQNQLYNELNLGRREEYDVLDKRRGRDPEMGGKPRRKNPQEGLYNELQKDKMAEAYSEIGMKGERRRGKGHDGLYQGLSTATKDTYDALHMQALPPR

SEQ ID NO: 7209 - protein, 470 aa, Artificial Sequence
  source: /note="Description of Artificial Sequence: Synthetic Chimeric Antigen Receptor"
MALPVTALLLPLALLLHAARPEVQLVESGGGLVQPGRSLRLSCTASGFTFTDYYMSWVRQAPGKGLEWVGFIRSKADGYTTEYAASVKGRFTISRDDSKSIAYLQMNSLKTEDTAVYYCTRDAAYYSYYSPEGAMDYWGQGTLVTVSSGGGGSGGGGSGGGGSMADYKDIQMTQSPSSVSASVGDRVTITCRASQNVDSAVAWYQQKPGKAPKLLIYSASYGQSGVPSRFSGSGSGTDFTLTISSLQPEDFATYYCQQYYSTPWTFGQGTKVEIKRGLAVSTISSFFPPGYQIYIWAPLAGTCGVLLLSLVITLYCKRGRKKLLYIFKQPFMRPVQTTQEEDGCSCRFPEEEEGGCELRVKFSRSADAPAYQQGQNQLYNELNLGRREEYDVLDKRRGRDPEMGGKPRRKNPQEGLYNELQKDKMAEAYSEIGMKGERRRGKGHDGLYQGLSTATKDTYDALHMQALPPR

SEQ ID NO: 7210 - protein, 499 aa, Artificial Sequence
  source: /note="Description of Artificial Sequence: Synthetic Chimeric Antigen Receptor"
MALPVTALLLPLALLLHAARPEVKLVESGGGLVQPGRSLRLSCTASGFTFTDYYMSWVRQAPGKGLEWVGLIRSKADGYTTEYSASVKGRFTISRDDSKSILYLQMNSLKTEDTAVYYCARDAAYYSYYSPEGAMDYWGQGTLVTVSSGGGGSGGGGSGGGGSMADYKDIVMTQSPSSVSASVGDRVTITCRASQNVDSAVAWYQQKPGKAPKALIYSASYRYSGVPSRFSGRGSGTDFTLTISSLQPEDFATYYCQQYYSTPWTFGQGTKVEIKRTTTPAPRPPTPAPTIASQPLSLRPEACRPAAGGAVHTRGLDFACDIYIWAPLAGTCGVLLLSLVITLYCKRGRKKLLYIFKQPFMRPVQTTQEEDGCSCRFPEEEEGGCELRVKFSRSADAPAYQQGQNQLYNELNLGRREEYDVLDKRRGRDPEMGGKPRRKNPQEGLYNELQKDKMAEAYSEIGMKGERRRGKGHDGLYQGLSTATKDTYDALHMQALPPR

SEQ ID NO: 7211 - protein, 499 aa, Artificial Sequence
  source: /note="Description of Artificial Sequence: Synthetic Chimeric Antigen Receptor"
MALPVTALLLPLALLLHAARPEVKLVESGGGLVQPGRSLRLSCTASGFTFTDYYMSWVRQAPGKGLEWVGLIRSKADGYTTEYSASVKGRFTISRDDSKSILYLQMNSLKTEDTAVYYCARDAAYYSYYSPEGAMDYWGQGTLVTVSSGGGGSGGGGSGGGGSMADYKDIQMTQSPSSVSASVGDRVTITCRASQNVDSAVAWYQQKPGKAPKALIYSASYRYSGVPSRFSGRGSGTDFTLTISSLQPEDFATYYCQQYYSTPWTFGQGTKVEIKRTTTPAPRPPTPAPTIASQPLSLRPEACRPAAGGAVHTRGLDFACDIYIWAPLAGTCGVLLLSLVITLYCKRGRKKLLYIFKQPFMRPVQTTQEEDGCSCRFPEEEEGGCELRVKFSRSADAPAYQQGQNQLYNELNLGRREEYDVLDKRRGRDPEMGGKPRRKNPQEGLYNELQKDKMAEAYSEIGMKGERRRGKGHDGLYQGLSTATKDTYDALHMQALPPR

SEQ ID NO: 7212 - protein, 499 aa, Artificial Sequence
  source: /note="Description of Artificial Sequence: Synthetic Chimeric Antigen Receptor"
MALPVTALLLPLALLLHAARPEVKLVESGGGLVQPGRSLRLSCTASGFTFTDYYMSWVRQAPGKGLEWVGLIRSKADGYTTEYSASVKGRFTISRDDSKSILYLQMNSLKTEDTAVYYCARDAAYYSYYSPEGAMDYWGQGTLVTVSSGGGGSGGGGSGGGGSMADYKDIQMTQSPSSVSASVGDRVTITCRASQNVDSAVAWYQQKPGKAPKALIYSASYRYSGVPSRFSGSGSGTDFTLTISSLQPEDFATYYCQQYYSTPWTFGQGTKVEIKRTTTPAPRPPTPAPTIASQPLSLRPEACRPAAGGAVHTRGLDFACDIYIWAPLAGTCGVLLLSLVITLYCKRGRKKLLYIFKQPFMRPVQTTQEEDGCSCRFPEEEEGGCELRVKFSRSADAPAYQQGQNQLYNELNLGRREEYDVLDKRRGRDPEMGGKPRRKNPQEGLYNELQKDKMAEAYSEIGMKGERRRGKGHDGLYQGLSTATKDTYDALHMQALPPR

SEQ ID NO: 7213 - protein, 499 aa, Artificial Sequence
  source: /note="Description of Artificial Sequence: Synthetic Chimeric Antigen Receptor"
MALPVTALLLPLALLLHAARPEVKLVESGGGLVQPGRSLRLSCTASGFTFTDYYMSWVRQAPGKGLEWVGLIRSKADGYTTEYSASVKGRFTISRDDSKSILYLQMNSLKTEDTAVYYCARDAAYYSYYSPEGAMDYWGQGTLVTVSSGGGGSGGGGSGGGGSMADYKDIQMTQSPSSVSASVGDRVTITCRASQNVDSAVAWYQQKPGKAPKLLIYSASYRYSGVPSRFSGSGSGTDFTLTISSLQPEDFATYYCQQYYSTPWTFGQGTKVEIKRTTTPAPRPPTPAPTIASQPLSLRPEACRPAAGGAVHTRGLDFACDIYIWAPLAGTCGVLLLSLVITLYCKRGRKKLLYIFKQPFMRPVQTTQEEDGCSCRFPEEEEGGCELRVKFSRSADAPAYQQGQNQLYNELNLGRREEYDVLDKRRGRDPEMGGKPRRKNPQEGLYNELQKDKMAEAYSEIGMKGERRRGKGHDGLYQGLSTATKDTYDALHMQALPPR

SEQ ID NO: 7214 - protein, 499 aa, Artificial Sequence
  source: /note="Description of Artificial Sequence: Synthetic Chimeric Antigen Receptor"
MALPVTALLLPLALLLHAARPEVKLVESGGGLVQPGRSLRLSCTASGFTFTDYYMSWVRQAPGKGLEWVGLIRSKADGYTTEYSASVKGRFTISRDDSKSILYLQMNSLKTEDTAVYYCARDAAYYSYYSPEGAMDYWGQGTLVTVSSGGGGSGGGGSGGGGSMADYKDIQMTQSPSSVSASVGDRVTITCRASQNVDSAVAWYQQKPGKAPKLLIYSASYRQSGVPSRFSGSGSGTDFTLTISSLQPEDFATYYCQQYYSTPWTFGQGTKVEIKRTTTPAPRPPTPAPTIASQPLSLRPEACRPAAGGAVHTRGLDFACDIYIWAPLAGTCGVLLLSLVITLYCKRGRKKLLYIFKQPFMRPVQTTQEEDGCSCRFPEEEEGGCELRVKFSRSADAPAYQQGQNQLYNELNLGRREEYDVLDKRRGRDPEMGGKPRRKNPQEGLYNELQKDKMAEAYSEIGMKGERRRGKGHDGLYQGLSTATKDTYDALHMQALPPR

SEQ ID NO: 7215 - protein, 499 aa, Artificial Sequence
  source: /note="Description of Artificial Sequence: Synthetic Chimeric Antigen Receptor"
MALPVTALLLPLALLLHAARPEVKLVESGGGLVQPGRSLRLSCTASGFTFTDYYMSWVRQAPGKGLEWVGLIRSKADGYTTEYSASVKGRFTISRDDSKSILYLQMNSLKTEDTAVYYCARDAAYYSYYSPEGAMDYWGQGTLVTVSSGGGGSGGGGSGGGGSMADYKDIQMTQSPSSVSASVGDRVTITCRASQNVDSAVAWYQQKPGKAPKLLIYSASYGQSGVPSRFSGSGSGTDFTLTISSLQPEDFATYYCQQYYSTPWTFGQGTKVEIKRTTTPAPRPPTPAPTIASQPLSLRPEACRPAAGGAVHTRGLDFACDIYIWAPLAGTCGVLLLSLVITLYCKRGRKKLLYIFKQPFMRPVQTTQEEDGCSCRFPEEEEGGCELRVKFSRSADAPAYQQGQNQLYNELNLGRREEYDVLDKRRGRDPEMGGKPRRKNPQEGLYNELQKDKMAEAYSEIGMKGERRRGKGHDGLYQGLSTATKDTYDALHMQALPPR

SEQ ID NO: 7216 - protein, 499 aa, Artificial Sequence
  source: /note="Description of Artificial Sequence: Synthetic Chimeric Antigen Receptor"
MALPVTALLLPLALLLHAARPEVQLVESGGGLVQPGRSLRLSCTASGFTFTDYYMSWVRQAPGKGLEWVGLIRSKADGYTTEYSASVKGRFTISRDDSKSILYLQMNSLKTEDTAVYYCARDAAYYSYYSPEGAMDYWGQGTLVTVSSGGGGSGGGGSGGGGSMADYKDIVMTQSPSSVSASVGDRVTITCRASQNVDSAVAWYQQKPGKAPKALIYSASYRYSGVPSRFSGRGSGTDFTLTISSLQPEDFATYYCQQYYSTPWTFGQGTKVEIKRTTTPAPRPPTPAPTIASQPLSLRPEACRPAAGGAVHTRGLDFACDIYIWAPLAGTCGVLLLSLVITLYCKRGRKKLLYIFKQPFMRPVQTTQEEDGCSCRFPEEEEGGCELRVKFSRSADAPAYQQGQNQLYNELNLGRREEYDVLDKRRGRDPEMGGKPRRKNPQEGLYNELQKDKMAEAYSEIGMKGERRRGKGHDGLYQGLSTATKDTYDALHMQALPPR

SEQ ID NO: 7217 - protein, 499 aa, Artificial Sequence
  source: /note="Description of Artificial Sequence: Synthetic Chimeric Antigen Receptor"
MALPVTALLLPLALLLHAARPEVQLVESGGGLVQPGRSLRLSCTASGFTFTDYYMSWVRQAPGKGLEWVGLIRSKADGYTTEYSASVKGRFTISRDDSKSILYLQMNSLKTEDTAVYYCARDAAYYSYYSPEGAMDYWGQGTLVTVSSGGGGSGGGGSGGGGSMADYKDIQMTQSPSSVSASVGDRVTITCRASQNVDSAVAWYQQKPGKAPKALIYSASYRYSGVPSRFSGRGSGTDFTLTISSLQPEDFATYYCQQYYSTPWTFGQGTKVEIKRTTTPAPRPPTPAPTIASQPLSLRPEACRPAAGGAVHTRGLDFACDIYIWAPLAGTCGVLLLSLVITLYCKRGRKKLLYIFKQPFMRPVQTTQEEDGCSCRFPEEEEGGCELRVKFSRSADAPAYQQGQNQLYNELNLGRREEYDVLDKRRGRDPEMGGKPRRKNPQEGLYNELQKDKMAEAYSEIGMKGERRRGKGHDGLYQGLSTATKDTYDALHMQALPPR

SEQ ID NO: 7218 - protein, 499 aa, Artificial Sequence
  source: /note="Description of Artificial Sequence: Synthetic Chimeric Antigen Receptor"
MALPVTALLLPLALLLHAARPEVQLVESGGGLVQPGRSLRLSCTASGFTFTDYYMSWVRQAPGKGLEWVGLIRSKADGYTTEYSASVKGRFTISRDDSKSILYLQMNSLKTEDTAVYYCARDAAYYSYYSPEGAMDYWGQGTLVTVSSGGGGSGGGGSGGGGSMADYKDIQMTQSPSSVSASVGDRVTITCRASQNVDSAVAWYQQKPGKAPKALIYSASYRYSGVPSRFSGSGSGTDFTLTISSLQPEDFATYYCQQYYSTPWTFGQGTKVEIKRTTTPAPRPPTPAPTIASQPLSLRPEACRPAAGGAVHTRGLDFACDIYIWAPLAGTCGVLLLSLVITLYCKRGRKKLLYIFKQPFMRPVQTTQEEDGCSCRFPEEEEGGCELRVKFSRSADAPAYQQGQNQLYNELNLGRREEYDVLDKRRGRDPEMGGKPRRKNPQEGLYNELQKDKMAEAYSEIGMKGERRRGKGHDGLYQGLSTATKDTYDALHMQALPPR

SEQ ID NO: 7219 - protein, 499 aa, Artificial Sequence
  source: /note="Description of Artificial Sequence: Synthetic Chimeric Antigen Receptor"
MALPVTALLLPLALLLHAARPEVQLVESGGGLVQPGRSLRLSCTASGFTFTDYYMSWVRQAPGKGLEWVGLIRSKADGYTTEYSASVKGRFTISRDDSKSILYLQMNSLKTEDTAVYYCARDAAYYSYYSPEGAMDYWGQGTLVTVSSGGGGSGGGGSGGGGSMADYKDIQMTQSPSSVSASVGDRVTITCRASQNVDSAVAWYQQKPGKAPKLLIYSASYRYSGVPSRFSGSGSGTDFTLTISSLQPEDFATYYCQQYYSTPWTFGQGTKVEIKRTTTPAPRPPTPAPTIASQPLSLRPEACRPAAGGAVHTRGLDFACDIYIWAPLAGTCGVLLLSLVITLYCKRGRKKLLYIFKQPFMRPVQTTQEEDGCSCRFPEEEEGGCELRVKFSRSADAPAYQQGQNQLYNELNLGRREEYDVLDKRRGRDPEMGGKPRRKNPQEGLYNELQKDKMAEAYSEIGMKGERRRGKGHDGLYQGLSTATKDTYDALHMQALPPR

SEQ ID NO: 7220 - protein, 499 aa, Artificial Sequence
  source: /note="Description of Artificial Sequence: Synthetic Chimeric Antigen Receptor"
MALPVTALLLPLALLLHAARPEVQLVESGGGLVQPGRSLRLSCTASGFTFTDYYMSWVRQAPGKGLEWVGLIRSKADGYTTEYSASVKGRFTISRDDSKSILYLQMNSLKTEDTAVYYCARDAAYYSYYSPEGAMDYWGQGTLVTVSSGGGGSGGGGSGGGGSMADYKDIQMTQSPSSVSASVGDRVTITCRASQNVDSAVAWYQQKPGKAPKLLIYSASYRQSGVPSRFSGSGSGTDFTLTISSLQPEDFATYYCQQYYSTPWTFGQGTKVEIKRTTTPAPRPPTPAPTIASQPLSLRPEACRPAAGGAVHTRGLDFACDIYIWAPLAGTCGVLLLSLVITLYCKRGRKKLLYIFKQPFMRPVQTTQEEDGCSCRFPEEEEGGCELRVKFSRSADAPAYQQGQNQLYNELNLGRREEYDVLDKRRGRDPEMGGKPRRKNPQEGLYNELQKDKMAEAYSEIGMKGERRRGKGHDGLYQGLSTATKDTYDALHMQALPPR

SEQ ID NO: 7221 - protein, 499 aa, Artificial Sequence
  source: /note="Description of Artificial Sequence: Synthetic Chimeric Antigen Receptor"
MALPVTALLLPLALLLHAARPEVQLVESGGGLVQPGRSLRLSCTASGFTFTDYYMSWVRQAPGKGLEWVGLIRSKADGYTTEYSASVKGRFTISRDDSKSILYLQMNSLKTEDTAVYYCARDAAYYSYYSPEGAMDYWGQGTLVTVSSGGGGSGGGGSGGGGSMADYKDIQMTQSPSSVSASVGDRVTITCRASQNVDSAVAWYQQKPGKAPKLLIYSASYGQSGVPSRFSGSGSGTDFTLTISSLQPEDFATYYCQQYYSTPWTFGQGTKVEIKRTTTPAPRPPTPAPTIASQPLSLRPEACRPAAGGAVHTRGLDFACDIYIWAPLAGTCGVLLLSLVITLYCKRGRKKLLYIFKQPFMRPVQTTQEEDGCSCRFPEEEEGGCELRVKFSRSADAPAYQQGQNQLYNELNLGRREEYDVLDKRRGRDPEMGGKPRRKNPQEGLYNELQKDKMAEAYSEIGMKGERRRGKGHDGLYQGLSTATKDTYDALHMQALPPR

SEQ ID NO: 7222 - protein, 499 aa, Artificial Sequence
  source: /note="Description of Artificial Sequence: Synthetic Chimeric Antigen Receptor"
MALPVTALLLPLALLLHAARPEVQLVESGGGLVQPGRSLRLSCTASGFTFTDYYMSWVRQAPGKGLEWVGLIRSKADGYTTEYSASVKGRFTISRDDSKSIAYLQMNSLKTEDTAVYYCARDAAYYSYYSPEGAMDYWGQGTLVTVSSGGGGSGGGGSGGGGSMADYKDIVMTQSPSSVSASVGDRVTITCRASQNVDSAVAWYQQKPGKAPKALIYSASYRYSGVPSRFSGRGSGTDFTLTISSLQPEDFATYYCQQYYSTPWTFGQGTKVEIKRTTTPAPRPPTPAPTIASQPLSLRPEACRPAAGGAVHTRGLDFACDIYIWAPLAGTCGVLLLSLVITLYCKRGRKKLLYIFKQPFMRPVQTTQEEDGCSCRFPEEEEGGCELRVKFSRSADAPAYQQGQNQLYNELNLGRREEYDVLDKRRGRDPEMGGKPRRKNPQEGLYNELQKDKMAEAYSEIGMKGERRRGKGHDGLYQGLSTATKDTYDALHMQALPPR

SEQ ID NO: 7223 - protein, 499 aa, Artificial Sequence
  source: /note="Description of Artificial Sequence: Synthetic Chimeric Antigen Receptor"
MALPVTALLLPLALLLHAARPEVQLVESGGGLVQPGRSLRLSCTASGFTFTDYYMSWVRQAPGKGLEWVGLIRSKADGYTTEYSASVKGRFTISRDDSKSIAYLQMNSLKTEDTAVYYCARDAAYYSYYSPEGAMDYWGQGTLVTVSSGGGGSGGGGSGGGGSMADYKDIQMTQSPSSVSASVGDRVTITCRASQNVDSAVAWYQQKPGKAPKALIYSASYRYSGVPSRFSGRGSGTDFTLTISSLQPEDFATYYCQQYYSTPWTFGQGTKVEIKRTTTPAPRPPTPAPTIASQPLSLRPEACRPAAGGAVHTRGLDFACDIYIWAPLAGTCGVLLLSLVITLYCKRGRKKLLYIFKQPFMRPVQTTQEEDGCSCRFPEEEEGGCELRVKFSRSADAPAYQQGQNQLYNELNLGRREEYDVLDKRRGRDPEMGGKPRRKNPQEGLYNELQKDKMAEAYSEIGMKGERRRGKGHDGLYQGLSTATKDTYDALHMQALPPR

SEQ ID NO: 7224 - protein, 499 aa, Artificial Sequence
  source: /note="Description of Artificial Sequence: Synthetic Chimeric Antigen Receptor"
MALPVTALLLPLALLLHAARPEVQLVESGGGLVQPGRSLRLSCTASGFTFTDYYMSWVRQAPGKGLEWVGLIRSKADGYTTEYSASVKGRFTISRDDSKSIAYLQMNSLKTEDTAVYYCARDAAYYSYYSPEGAMDYWGQGTLVTVSSGGGGSGGGGSGGGGSMADYKDIQMTQSPSSVSASVGDRVTITCRASQNVDSAVAWYQQKPGKAPKALIYSASYRYSGVPSRFSGSGSGTDFTLTISSLQPEDFATYYCQQYYSTPWTFGQGTKVEIKRTTTPAPRPPTPAPTIASQPLSLRPEACRPAAGGAVHTRGLDFACDIYIWAPLAGTCGVLLLSLVITLYCKRGRKKLLYIFKQPFMRPVQTTQEEDGCSCRFPEEEEGGCELRVKFSRSADAPAYQQGQNQLYNELNLGRREEYDVLDKRRGRDPEMGGKPRRKNPQEGLYNELQKDKMAEAYSEIGMKGERRRGKGHDGLYQGLSTATKDTYDALHMQALPPR

SEQ ID NO: 7225 - protein, 499 aa, Artificial Sequence
  source: /note="Description of Artificial Sequence: Synthetic Chimeric Antigen Receptor"
MALPVTALLLPLALLLHAARPEVQLVESGGGLVQPGRSLRLSCTASGFTFTDYYMSWVRQAPGKGLEWVGLIRSKADGYTTEYSASVKGRFTISRDDSKSIAYLQMNSLKTEDTAVYYCARDAAYYSYYSPEGAMDYWGQGTLVTVSSGGGGSGGGGSGGGGSMADYKDIQMTQSPSSVSASVGDRVTITCRASQNVDSAVAWYQQKPGKAPKLLIYSASYRYSGVPSRFSGSGSGTDFTLTISSLQPEDFATYYCQQYYSTPWTFGQGTKVEIKRTTTPAPRPPTPAPTIASQPLSLRPEACRPAAGGAVHTRGLDFACDIYIWAPLAGTCGVLLLSLVITLYCKRGRKKLLYIFKQPFMRPVQTTQEEDGCSCRFPEEEEGGCELRVKFSRSADAPAYQQGQNQLYNELNLGRREEYDVLDKRRGRDPEMGGKPRRKNPQEGLYNELQKDKMAEAYSEIGMKGERRRGKGHDGLYQGLSTATKDTYDALHMQALPPR

SEQ ID NO: 7226 - protein, 499 aa, Artificial Sequence
  source: /note="Description of Artificial Sequence: Synthetic Chimeric Antigen Receptor"
MALPVTALLLPLALLLHAARPEVQLVESGGGLVQPGRSLRLSCTASGFTFTDYYMSWVRQAPGKGLEWVGLIRSKADGYTTEYSASVKGRFTISRDDSKSIAYLQMNSLKTEDTAVYYCARDAAYYSYYSPEGAMDYWGQGTLVTVSSGGGGSGGGGSGGGGSMADYKDIQMTQSPSSVSASVGDRVTITCRASQNVDSAVAWYQQKPGKAPKLLIYSASYRQSGVPSRFSGSGSGTDFTLTISSLQPEDFATYYCQQYYSTPWTFGQGTKVEIKRTTTPAPRPPTPAPTIASQPLSLRPEACRPAAGGAVHTRGLDFACDIYIWAPLAGTCGVLLLSLVITLYCKRGRKKLLYIFKQPFMRPVQTTQEEDGCSCRFPEEEEGGCELRVKFSRSADAPAYQQGQNQLYNELNLGRREEYDVLDKRRGRDPEMGGKPRRKNPQEGLYNELQKDKMAEAYSEIGMKGERRRGKGHDGLYQGLSTATKDTYDALHMQALPPR

SEQ ID NO: 7227 - protein, 499 aa, Artificial Sequence
  source: /note="Description of Artificial Sequence: Synthetic Chimeric Antigen Receptor"
MALPVTALLLPLALLLHAARPEVQLVESGGGLVQPGRSLRLSCTASGFTFTDYYMSWVRQAPGKGLEWVGLIRSKADGYTTEYSASVKGRFTISRDDSKSIAYLQMNSLKTEDTAVYYCARDAAYYSYYSPEGAMDYWGQGTLVTVSSGGGGSGGGGSGGGGSMADYKDIQMTQSPSSVSASVGDRVTITCRASQNVDSAVAWYQQKPGKAPKLLIYSASYGQSGVPSRFSGSGSGTDFTLTISSLQPEDFATYYCQQYYSTPWTFGQGTKVEIKRTTTPAPRPPTPAPTIASQPLSLRPEACRPAAGGAVHTRGLDFACDIYIWAPLAGTCGVLLLSLVITLYCKRGRKKLLYIFKQPFMRPVQTTQEEDGCSCRFPEEEEGGCELRVKFSRSADAPAYQQGQNQLYNELNLGRREEYDVLDKRRGRDPEMGGKPRRKNPQEGLYNELQKDKMAEAYSEIGMKGERRRGKGHDGLYQGLSTATKDTYDALHMQALPPR

SEQ ID NO: 7228 - protein, 499 aa, Artificial Sequence
  source: /note="Description of Artificial Sequence: Synthetic Chimeric Antigen Receptor"
MALPVTALLLPLALLLHAARPEVQLVESGGGLVQPGRSLRLSCTASGFTFTDYYMSWVRQAPGKGLEWVGFIRSKADGYTTEYSASVKGRFTISRDDSKSIAYLQMNSLKTEDTAVYYCARDAAYYSYYSPEGAMDYWGQGTLVTVSSGGGGSGGGGSGGGGSMADYKDIVMTQSPSSVSASVGDRVTITCRASQNVDSAVAWYQQKPGKAPKALIYSASYRYSGVPSRFSGRGSGTDFTLTISSLQPEDFATYYCQQYYSTPWTFGQGTKVEIKRTTTPAPRPPTPAPTIASQPLSLRPEACRPAAGGAVHTRGLDFACDIYIWAPLAGTCGVLLLSLVITLYCKRGRKKLLYIFKQPFMRPVQTTQEEDGCSCRFPEEEEGGCELRVKFSRSADAPAYQQGQNQLYNELNLGRREEYDVLDKRRGRDPEMGGKPRRKNPQEGLYNELQKDKMAEAYSEIGMKGERRRGKGHDGLYQGLSTATKDTYDALHMQALPPR

SEQ ID NO: 7229 - protein, 499 aa, Artificial Sequence
  source: /note="Description of Artificial Sequence: Synthetic Chimeric Antigen Receptor"
MALPVTALLLPLALLLHAARPEVQLVESGGGLVQPGRSLRLSCTASGFTFTDYYMSWVRQAPGKGLEWVGFIRSKADGYTTEYSASVKGRFTISRDDSKSIAYLQMNSLKTEDTAVYYCARDAAYYSYYSPEGAMDYWGQGTLVTVSSGGGGSGGGGSGGGGSMADYKDIQMTQSPSSVSASVGDRVTITCRASQNVDSAVAWYQQKPGKAPKALIYSASYRYSGVPSRFSGRGSGTDFTLTISSLQPEDFATYYCQQYYSTPWTFGQGTKVEIKRTTTPAPRPPTPAPTIASQPLSLRPEACRPAAGGAVHTRGLDFACDIYIWAPLAGTCGVLLLSLVITLYCKRGRKKLLYIFKQPFMRPVQTTQEEDGCSCRFPEEEEGGCELRVKFSRSADAPAYQQGQNQLYNELNLGRREEYDVLDKRRGRDPEMGGKPRRKNPQEGLYNELQKDKMAEAYSEIGMKGERRRGKGHDGLYQGLSTATKDTYDALHMQALPPR

SEQ ID NO: 7230 - protein, 499 aa, Artificial Sequence
  source: /note="Description of Artificial Sequence: Synthetic Chimeric Antigen Receptor"
MALPVTALLLPLALLLHAARPEVQLVESGGGLVQPGRSLRLSCTASGFTFTDYYMSWVRQAPGKGLEWVGFIRSKADGYTTEYSASVKGRFTISRDDSKSIAYLQMNSLKTEDTAVYYCARDAAYYSYYSPEGAMDYWGQGTLVTVSSGGGGSGGGGSGGGGSMADYKDIQMTQSPSSVSASVGDRVTITCRASQNVDSAVAWYQQKPGKAPKALIYSASYRYSGVPSRFSGSGSGTDFTLTISSLQPEDFATYYCQQYYSTPWTFGQGTKVEIKRTTTPAPRPPTPAPTIASQPLSLRPEACRPAAGGAVHTRGLDFACDIYIWAPLAGTCGVLLLSLVITLYCKRGRKKLLYIFKQPFMRPVQTTQEEDGCSCRFPEEEEGGCELRVKFSRSADAPAYQQGQNQLYNELNLGRREEYDVLDKRRGRDPEMGGKPRRKNPQEGLYNELQKDKMAEAYSEIGMKGERRRGKGHDGLYQGLSTATKDTYDALHMQALPPR

SEQ ID NO: 7231 - protein, 499 aa, Artificial Sequence
  source: /note="Description of Artificial Sequence: Synthetic Chimeric Antigen Receptor"
MALPVTALLLPLALLLHAARPEVQLVESGGGLVQPGRSLRLSCTASGFTFTDYYMSWVRQAPGKGLEWVGFIRSKADGYTTEYSASVKGRFTISRDDSKSIAYLQMNSLKTEDTAVYYCARDAAYYSYYSPEGAMDYWGQGTLVTVSSGGGGSGGGGSGGGGSMADYKDIQMTQSPSSVSASVGDRVTITCRASQNVDSAVAWYQQKPGKAPKLLIYSASYRYSGVPSRFSGSGSGTDFTLTISSLQPEDFATYYCQQYYSTPWTFGQGTKVEIKRTTTPAPRPPTPAPTIASQPLSLRPEACRPAAGGAVHTRGLDFACDIYIWAPLAGTCGVLLLSLVITLYCKRGRKKLLYIFKQPFMRPVQTTQEEDGCSCRFPEEEEGGCELRVKFSRSADAPAYQQGQNQLYNELNLGRREEYDVLDKRRGRDPEMGGKPRRKNPQEGLYNELQKDKMAEAYSEIGMKGERRRGKGHDGLYQGLSTATKDTYDALHMQALPPR

SEQ ID NO: 7232 - protein, 499 aa, Artificial Sequence
  source: /note="Description of Artificial Sequence: Synthetic Chimeric Antigen Receptor"
MALPVTALLLPLALLLHAARPEVQLVESGGGLVQPGRSLRLSCTASGFTFTDYYMSWVRQAPGKGLEWVGFIRSKADGYTTEYSASVKGRFTISRDDSKSIAYLQMNSLKTEDTAVYYCARDAAYYSYYSPEGAMDYWGQGTLVTVSSGGGGSGGGGSGGGGSMADYKDIQMTQSPSSVSASVGDRVTITCRASQNVDSAVAWYQQKPGKAPKLLIYSASYRQSGVPSRFSGSGSGTDFTLTISSLQPEDFATYYCQQYYSTPWTFGQGTKVEIKRTTTPAPRPPTPAPTIASQPLSLRPEACRPAAGGAVHTRGLDFACDIYIWAPLAGTCGVLLLSLVITLYCKRGRKKLLYIFKQPFMRPVQTTQEEDGCSCRFPEEEEGGCELRVKFSRSADAPAYQQGQNQLYNELNLGRREEYDVLDKRRGRDPEMGGKPRRKNPQEGLYNELQKDKMAEAYSEIGMKGERRRGKGHDGLYQGLSTATKDTYDALHMQALPPR

SEQ ID NO: 7233 - protein, 499 aa, Artificial Sequence
  source: /note="Description of Artificial Sequence: Synthetic Chimeric Antigen Receptor"
MALPVTALLLPLALLLHAARPEVQLVESGGGLVQPGRSLRLSCTASGFTFTDYYMSWVRQAPGKGLEWVGFIRSKADGYTTEYSASVKGRFTISRDDSKSIAYLQMNSLKTEDTAVYYCARDAAYYSYYSPEGAMDYWGQGTLVTVSSGGGGSGGGGSGGGGSMADYKDIQMTQSPSSVSASVGDRVTITCRASQNVDSAVAWYQQKPGKAPKLLIYSASYGQSGVPSRFSGSGSGTDFTLTISSLQPEDFATYYCQQYYSTPWTFGQGTKVEIKRTTTPAPRPPTPAPTIASQPLSLRPEACRPAAGGAVHTRGLDFACDIYIWAPLAGTCGVLLLSLVITLYCKRGRKKLLYIFKQPFMRPVQTTQEEDGCSCRFPEEEEGGCELRVKFSRSADAPAYQQGQNQLYNELNLGRREEYDVLDKRRGRDPEMGGKPRRKNPQEGLYNELQKDKMAEAYSEIGMKGERRRGKGHDGLYQGLSTATKDTYDALHMQALPPR

SEQ ID NO: 7234 - protein, 499 aa, Artificial Sequence
  source: /note="Description of Artificial Sequence: Synthetic Chimeric Antigen Receptor"
MALPVTALLLPLALLLHAARPEVQLVESGGGLVQPGRSLRLSCTASGFTFTDYYMSWVRQAPGKGLEWVGFIRSKADGYTTEYAASVKGRFTISRDDSKSIAYLQMNSLKTEDTAVYYCARDAAYYSYYSPEGAMDYWGQGTLVTVSSGGGGSGGGGSGGGGSMADYKDIVMTQSPSSVSASVGDRVTITCRASQNVDSAVAWYQQKPGKAPKALIYSASYRYSGVPSRFSGRGSGTDFTLTISSLQPEDFATYYCQQYYSTPWTFGQGTKVEIKRTTTPAPRPPTPAPTIASQPLSLRPEACRPAAGGAVHTRGLDFACDIYIWAPLAGTCGVLLLSLVITLYCKRGRKKLLYIFKQPFMRPVQTTQEEDGCSCRFPEEEEGGCELRVKFSRSADAPAYQQGQNQLYNELNLGRREEYDVLDKRRGRDPEMGGKPRRKNPQEGLYNELQKDKMAEAYSEIGMKGERRRGKGHDGLYQGLSTATKDTYDALHMQALPPR

SEQ ID NO: 7235 - protein, 499 aa, Artificial Sequence
  source: /note="Description of Artificial Sequence: Synthetic Chimeric Antigen Receptor"
MALPVTALLLPLALLLHAARPEVQLVESGGGLVQPGRSLRLSCTASGFTFTDYYMSWVRQAPGKGLEWVGFIRSKADGYTTEYAASVKGRFTISRDDSKSIAYLQMNSLKTEDTAVYYCARDAAYYSYYSPEGAMDYWGQGTLVTVSSGGGGSGGGGSGGGGSMADYKDIQMTQSPSSVSASVGDRVTITCRASQNVDSAVAWYQQKPGKAPKALIYSASYRYSGVPSRFSGRGSGTDFTLTISSLQPEDFATYYCQQYYSTPWTFGQGTKVEIKRTTTPAPRPPTPAPTIASQPLSLRPEACRPAAGGAVHTRGLDFACDIYIWAPLAGTCGVLLLSLVITLYCKRGRKKLLYIFKQPFMRPVQTTQEEDGCSCRFPEEEEGGCELRVKFSRSADAPAYQQGQNQLYNELNLGRREEYDVLDKRRGRDPEMGGKPRRKNPQEGLYNELQKDKMAEAYSEIGMKGERRRGKGHDGLYQGLSTATKDTYDALHMQALPPR

SEQ ID NO: 7236 - protein, 499 aa, Artificial Sequence
  source: /note="Description of Artificial Sequence: Synthetic Chimeric Antigen Receptor"
MALPVTALLLPLALLLHAARPEVQLVESGGGLVQPGRSLRLSCTASGFTFTDYYMSWVRQAPGKGLEWVGFIRSKADGYTTEYAASVKGRFTISRDDSKSIAYLQMNSLKTEDTAVYYCARDAAYYSYYSPEGAMDYWGQGTLVTVSSGGGGSGGGGSGGGGSMADYKDIQMTQSPSSVSASVGDRVTITCRASQNVDSAVAWYQQKPGKAPKALIYSASYRYSGVPSRFSGSGSGTDFTLTISSLQPEDFATYYCQQYYSTPWTFGQGTKVEIKRTTTPAPRPPTPAPTIASQPLSLRPEACRPAAGGAVHTRGLDFACDIYIWAPLAGTCGVLLLSLVITLYCKRGRKKLLYIFKQPFMRPVQTTQEEDGCSCRFPEEEEGGCELRVKFSRSADAPAYQQGQNQLYNELNLGRREEYDVLDKRRGRDPEMGGKPRRKNPQEGLYNELQKDKMAEAYSEIGMKGERRRGKGHDGLYQGLSTATKDTYDALHMQALPPR

SEQ ID NO: 7237 - protein, 499 aa, Artificial Sequence
  source: /note="Description of Artificial Sequence: Synthetic Chimeric Antigen Receptor"
MALPVTALLLPLALLLHAARPEVQLVESGGGLVQPGRSLRLSCTASGFTFTDYYMSWVRQAPGKGLEWVGFIRSKADGYTTEYAASVKGRFTISRDDSKSIAYLQMNSLKTEDTAVYYCARDAAYYSYYSPEGAMDYWGQGTLVTVSSGGGGSGGGGSGGGGSMADYKDIQMTQSPSSVSASVGDRVTITCRASQNVDSAVAWYQQKPGKAPKLLIYSASYRYSGVPSRFSGSGSGTDFTLTISSLQPEDFATYYCQQYYSTPWTFGQGTKVEIKRTTTPAPRPPTPAPTIASQPLSLRPEACRPAAGGAVHTRGLDFACDIYIWAPLAGTCGVLLLSLVITLYCKRGRKKLLYIFKQPFMRPVQTTQEEDGCSCRFPEEEEGGCELRVKFSRSADAPAYQQGQNQLYNELNLGRREEYDVLDKRRGRDPEMGGKPRRKNPQEGLYNELQKDKMAEAYSEIGMKGERRRGKGHDGLYQGLSTATKDTYDALHMQALPPR

SEQ ID NO: 7238 - protein, 499 aa, Artificial Sequence
  source: /note="Description of Artificial Sequence: Synthetic Chimeric Antigen Receptor"
MALPVTALLLPLALLLHAARPEVQLVESGGGLVQPGRSLRLSCTASGFTFTDYYMSWVRQAPGKGLEWVGFIRSKADGYTTEYAASVKGRFTISRDDSKSIAYLQMNSLKTEDTAVYYCARDAAYYSYYSPEGAMDYWGQGTLVTVSSGGGGSGGGGSGGGGSMADYKDIQMTQSPSSVSASVGDRVTITCRASQNVDSAVAWYQQKPGKAPKLLIYSASYRQSGVPSRFSGSGSGTDFTLTISSLQPEDFATYYCQQYYSTPWTFGQGTKVEIKRTTTPAPRPPTPAPTIASQPLSLRPEACRPAAGGAVHTRGLDFACDIYIWAPLAGTCGVLLLSLVITLYCKRGRKKLLYIFKQPFMRPVQTTQEEDGCSCRFPEEEEGGCELRVKFSRSADAPAYQQGQNQLYNELNLGRREEYDVLDKRRGRDPEMGGKPRRKNPQEGLYNELQKDKMAEAYSEIGMKGERRRGKGHDGLYQGLSTATKDTYDALHMQALPPR

SEQ ID NO: 7239 - protein, 499 aa, Artificial Sequence
  source: /note="Description of Artificial Sequence: Synthetic Chimeric Antigen Receptor"
MALPVTALLLPLALLLHAARPEVQLVESGGGLVQPGRSLRLSCTASGFTFTDYYMSWVRQAPGKGLEWVGFIRSKADGYTTEYAASVKGRFTISRDDSKSIAYLQMNSLKTEDTAVYYCARDAAYYSYYSPEGAMDYWGQGTLVTVSSGGGGSGGGGSGGGGSMADYKDIQMTQSPSSVSASVGDRVTITCRASQNVDSAVAWYQQKPGKAPKLLIYSASYGQSGVPSRFSGSGSGTDFTLTISSLQPEDFATYYCQQYYSTPWTFGQGTKVEIKRTTTPAPRPPTPAPTIASQPLSLRPEACRPAAGGAVHTRGLDFACDIYIWAPLAGTCGVLLLSLVITLYCKRGRKKLLYIFKQPFMRPVQTTQEEDGCSCRFPEEEEGGCELRVKFSRSADAPAYQQGQNQLYNELNLGRREEYDVLDKRRGRDPEMGGKPRRKNPQEGLYNELQKDKMAEAYSEIGMKGERRRGKGHDGLYQGLSTATKDTYDALHMQALPPR

SEQ ID NO: 7240 - protein, 499 aa, Artificial Sequence
  source: /note="Description of Artificial Sequence: Synthetic Chimeric Antigen Receptor"
MALPVTALLLPLALLLHAARPEVQLVESGGGLVQPGRSLRLSCTASGFTFTDYYMSWVRQAPGKGLEWVGLIRSKADGYTTEYAASVKGRFTISRDDSKSIAYLQMNSLKTEDTAVYYCARDAAYYSYYSPEGAMDYWGQGTLVTVSSGGGGSGGGGSGGGGSMADYKDIVMTQSPSSVSASVGDRVTITCRASQNVDSAVAWYQQKPGKAPKALIYSASYRYSGVPSRFSGRGSGTDFTLTISSLQPEDFATYYCQQYYSTPWTFGQGTKVEIKRTTTPAPRPPTPAPTIASQPLSLRPEACRPAAGGAVHTRGLDFACDIYIWAPLAGTCGVLLLSLVITLYCKRGRKKLLYIFKQPFMRPVQTTQEEDGCSCRFPEEEEGGCELRVKFSRSADAPAYQQGQNQLYNELNLGRREEYDVLDKRRGRDPEMGGKPRRKNPQEGLYNELQKDKMAEAYSEIGMKGERRRGKGHDGLYQGLSTATKDTYDALHMQALPPR

SEQ ID NO: 7241 - protein, 499 aa, Artificial Sequence
  source: /note="Description of Artificial Sequence: Synthetic Chimeric Antigen Receptor"
MALPVTALLLPLALLLHAARPEVQLVESGGGLVQPGRSLRLSCTASGFTFTDYYMSWVRQAPGKGLEWVGLIRSKADGYTTEYAASVKGRFTISRDDSKSIAYLQMNSLKTEDTAVYYCARDAAYYSYYSPEGAMDYWGQGTLVTVSSGGGGSGGGGSGGGGSMADYKDIQMTQSPSSVSASVGDRVTITCRASQNVDSAVAWYQQKPGKAPKALIYSASYRYSGVPSRFSGRGSGTDFTLTISSLQPEDFATYYCQQYYSTPWTFGQGTKVEIKRTTTPAPRPPTPAPTIASQPLSLRPEACRPAAGGAVHTRGLDFACDIYIWAPLAGTCGVLLLSLVITLYCKRGRKKLLYIFKQPFMRPVQTTQEEDGCSCRFPEEEEGGCELRVKFSRSADAPAYQQGQNQLYNELNLGRREEYDVLDKRRGRDPEMGGKPRRKNPQEGLYNELQKDKMAEAYSEIGMKGERRRGKGHDGLYQGLSTATKDTYDALHMQALPPR

SEQ ID NO: 7242 - protein, 499 aa, Artificial Sequence
  source: /note="Description of Artificial Sequence: Synthetic Chimeric Antigen Receptor"
MALPVTALLLPLALLLHAARPEVQLVESGGGLVQPGRSLRLSCTASGFTFTDYYMSWVRQAPGKGLEWVGLIRSKADGYTTEYAASVKGRFTISRDDSKSIAYLQMNSLKTEDTAVYYCARDAAYYSYYSPEGAMDYWGQGTLVTVSSGGGGSGGGGSGGGGSMADYKDIQMTQSPSSVSASVGDRVTITCRASQNVDSAVAWYQQKPGKAPKALIYSASYRYSGVPSRFSGSGSGTDFTLTISSLQPEDFATYYCQQYYSTPWTFGQGTKVEIKRTTTPAPRPPTPAPTIASQPLSLRPEACRPAAGGAVHTRGLDFACDIYIWAPLAGTCGVLLLSLVITLYCKRGRKKLLYIFKQPFMRPVQTTQEEDGCSCRFPEEEEGGCELRVKFSRSADAPAYQQGQNQLYNELNLGRREEYDVLDKRRGRDPEMGGKPRRKNPQEGLYNELQKDKMAEAYSEIGMKGERRRGKGHDGLYQGLSTATKDTYDALHMQALPPR

SEQ ID NO: 7243 - protein, 499 aa, Artificial Sequence
  source: /note="Description of Artificial Sequence: Synthetic Chimeric Antigen Receptor"
MALPVTALLLPLALLLHAARPEVQLVESGGGLVQPGRSLRLSCTASGFTFTDYYMSWVRQAPGKGLEWVGLIRSKADGYTTEYAASVKGRFTISRDDSKSIAYLQMNSLKTEDTAVYYCARDAAYYSYYSPEGAMDYWGQGTLVTVSSGGGGSGGGGSGGGGSMADYKDIQMTQSPSSVSASVGDRVTITCRASQNVDSAVAWYQQKPGKAPKLLIYSASYRYSGVPSRFSGSGSGTDFTLTISSLQPEDFATYYCQQYYSTPWTFGQGTKVEIKRTTTPAPRPPTPAPTIASQPLSLRPEACRPAAGGAVHTRGLDFACDIYIWAPLAGTCGVLLLSLVITLYCKRGRKKLLYIFKQPFMRPVQTTQEEDGCSCRFPEEEEGGCELRVKFSRSADAPAYQQGQNQLYNELNLGRREEYDVLDKRRGRDPEMGGKPRRKNPQEGLYNELQKDKMAEAYSEIGMKGERRRGKGHDGLYQGLSTATKDTYDALHMQALPPR

SEQ ID NO: 7244 - protein, 499 aa, Artificial Sequence
  source: /note="Description of Artificial Sequence: Synthetic Chimeric Antigen Receptor"
MALPVTALLLPLALLLHAARPEVQLVESGGGLVQPGRSLRLSCTASGFTFTDYYMSWVRQAPGKGLEWVGLIRSKADGYTTEYAASVKGRFTISRDDSKSIAYLQMNSLKTEDTAVYYCARDAAYYSYYSPEGAMDYWGQGTLVTVSSGGGGSGGGGSGGGGSMADYKDIQMTQSPSSVSASVGDRVTITCRASQNVDSAVAWYQQKPGKAPKLLIYSASYRQSGVPSRFSGSGSGTDFTLTISSLQPEDFATYYCQQYYSTPWTFGQGTKVEIKRTTTPAPRPPTPAPTIASQPLSLRPEACRPAAGGAVHTRGLDFACDIYIWAPLAGTCGVLLLSLVITLYCKRGRKKLLYIFKQPFMRPVQTTQEEDGCSCRFPEEEEGGCELRVKFSRSADAPAYQQGQNQLYNELNLGRREEYDVLDKRRGRDPEMGGKPRRKNPQEGLYNELQKDKMAEAYSEIGMKGERRRGKGHDGLYQGLSTATKDTYDALHMQALPPR

SEQ ID NO: 7245 - protein, 499 aa, Artificial Sequence
  source: /note="Description of Artificial Sequence: Synthetic Chimeric Antigen Receptor"
MALPVTALLLPLALLLHAARPEVQLVESGGGLVQPGRSLRLSCTASGFTFTDYYMSWVRQAPGKGLEWVGLIRSKADGYTTEYAASVKGRFTISRDDSKSIAYLQMNSLKTEDTAVYYCARDAAYYSYYSPEGAMDYWGQGTLVTVSSGGGGSGGGGSGGGGSMADYKDIQMTQSPSSVSASVGDRVTITCRASQNVDSAVAWYQQKPGKAPKLLIYSASYGQSGVPSRFSGSGSGTDFTLTISSLQPEDFATYYCQQYYSTPWTFGQGTKVEIKRTTTPAPRPPTPAPTIASQPLSLRPEACRPAAGGAVHTRGLDFACDIYIWAPLAGTCGVLLLSLVITLYCKRGRKKLLYIFKQPFMRPVQTTQEEDGCSCRFPEEEEGGCELRVKFSRSADAPAYQQGQNQLYNELNLGRREEYDVLDKRRGRDPEMGGKPRRKNPQEGLYNELQKDKMAEAYSEIGMKGERRRGKGHDGLYQGLSTATKDTYDALHMQALPPR

SEQ ID NO: 7246 - protein, 499 aa, Artificial Sequence
  source: /note="Description of Artificial Sequence: Synthetic Chimeric Antigen Receptor"
MALPVTALLLPLALLLHAARPEVQLVESGGGLVQPGRSLRLSCTASGFTFTDYYMSWVRQAPGKGLEWVGFIRSKADGYTTEYAASVKGRFTISRDDSKSIAYLQMNSLKTEDTAVYYCTRDAAYYSYYSPEGAMDYWGQGTLVTVSSGGGGSGGGGSGGGGSMADYKDIVMTQSPSSVSASVGDRVTITCRASQNVDSAVAWYQQKPGKAPKALIYSASYRYSGVPSRFSGRGSGTDFTLTISSLQPEDFATYYCQQYYSTPWTFGQGTKVEIKRTTTPAPRPPTPAPTIASQPLSLRPEACRPAAGGAVHTRGLDFACDIYIWAPLAGTCGVLLLSLVITLYCKRGRKKLLYIFKQPFMRPVQTTQEEDGCSCRFPEEEEGGCELRVKFSRSADAPAYQQGQNQLYNELNLGRREEYDVLDKRRGRDPEMGGKPRRKNPQEGLYNELQKDKMAEAYSEIGMKGERRRGKGHDGLYQGLSTATKDTYDALHMQALPPR

SEQ ID NO: 7247 - protein, 499 aa, Artificial Sequence
  source: /note="Description of Artificial Sequence: Synthetic Chimeric Antigen Receptor"
MALPVTALLLPLALLLHAARPEVQLVESGGGLVQPGRSLRLSCTASGFTFTDYYMSWVRQAPGKGLEWVGFIRSKADGYTTEYAASVKGRFTISRDDSKSIAYLQMNSLKTEDTAVYYCTRDAAYYSYYSPEGAMDYWGQGTLVTVSSGGGGSGGGGSGGGGSMADYKDIQMTQSPSSVSASVGDRVTITCRASQNVDSAVAWYQQKPGKAPKALIYSASYRYSGVPSRFSGRGSGTDFTLTISSLQPEDFATYYCQQYYSTPWTFGQGTKVEIKRTTTPAPRPPTPAPTIASQPLSLRPEACRPAAGGAVHTRGLDFACDIYIWAPLAGTCGVLLLSLVITLYCKRGRKKLLYIFKQPFMRPVQTTQEEDGCSCRFPEEEEGGCELRVKFSRSADAPAYQQGQNQLYNELNLGRREEYDVLDKRRGRDPEMGGKPRRKNPQEGLYNELQKDKMAEAYSEIGMKGERRRGKGHDGLYQGLSTATKDTYDALHMQALPPR

SEQ ID NO: 7248 - protein, 499 aa, Artificial Sequence
  source: /note="Description of Artificial Sequence: Synthetic Chimeric Antigen Receptor"
MALPVTALLLPLALLLHAARPEVQLVESGGGLVQPGRSLRLSCTASGFTFTDYYMSWVRQAPGKGLEWVGFIRSKADGYTTEYAASVKGRFTISRDDSKSIAYLQMNSLKTEDTAVYYCTRDAAYYSYYSPEGAMDYWGQGTLVTVSSGGGGSGGGGSGGGGSMADYKDIQMTQSPSSVSASVGDRVTITCRASQNVDSAVAWYQQKPGKAPKALIYSASYRYSGVPSRFSGSGSGTDFTLTISSLQPEDFATYYCQQYYSTPWTFGQGTKVEIKRTTTPAPRPPTPAPTIASQPLSLRPEACRPAAGGAVHTRGLDFACDIYIWAPLAGTCGVLLLSLVITLYCKRGRKKLLYIFKQPFMRPVQTTQEEDGCSCRFPEEEEGGCELRVKFSRSADAPAYQQGQNQLYNELNLGRREEYDVLDKRRGRDPEMGGKPRRKNPQEGLYNELQKDKMAEAYSEIGMKGERRRGKGHDGLYQGLSTATKDTYDALHMQALPPR

SEQ ID NO: 7249 - protein, 499 aa, Artificial Sequence
  source: /note="Description of Artificial Sequence: Synthetic Chimeric Antigen Receptor"
MALPVTALLLPLALLLHAARPEVQLVESGGGLVQPGRSLRLSCTASGFTFTDYYMSWVRQAPGKGLEWVGFIRSKADGYTTEYAASVKGRFTISRDDSKSIAYLQMNSLKTEDTAVYYCTRDAAYYSYYSPEGAMDYWGQGTLVTVSSGGGGSGGGGSGGGGSMADYKDIQMTQSPSSVSASVGDRVTITCRASQNVDSAVAWYQQKPGKAPKLLIYSASYRYSGVPSRFSGSGSGTDFTLTISSLQPEDFATYYCQQYYSTPWTFGQGTKVEIKRTTTPAPRPPTPAPTIASQPLSLRPEACRPAAGGAVHTRGLDFACDIYIWAPLAGTCGVLLLSLVITLYCKRGRKKLLYIFKQPFMRPVQTTQEEDGCSCRFPEEEEGGCELRVKFSRSADAPAYQQGQNQLYNELNLGRREEYDVLDKRRGRDPEMGGKPRRKNPQEGLYNELQKDKMAEAYSEIGMKGERRRGKGHDGLYQGLSTATKDTYDALHMQALPPR

SEQ ID NO: 7250 - protein, 499 aa, Artificial Sequence
  source: /note="Description of Artificial Sequence: Synthetic Chimeric Antigen Receptor"
MALPVTALLLPLALLLHAARPEVQLVESGGGLVQPGRSLRLSCTASGFTFTDYYMSWVRQAPGKGLEWVGFIRSKADGYTTEYAASVKGRFTISRDDSKSIAYLQMNSLKTEDTAVYYCTRDAAYYSYYSPEGAMDYWGQGTLVTVSSGGGGSGGGGSGGGGSMADYKDIQMTQSPSSVSASVGDRVTITCRASQNVDSAVAWYQQKPGKAPKLLIYSASYRQSGVPSRFSGSGSGTDFTLTISSLQPEDFATYYCQQYYSTPWTFGQGTKVEIKRTTTPAPRPPTPAPTIASQPLSLRPEACRPAAGGAVHTRGLDFACDIYIWAPLAGTCGVLLLSLVITLYCKRGRKKLLYIFKQPFMRPVQTTQEEDGCSCRFPEEEEGGCELRVKFSRSADAPAYQQGQNQLYNELNLGRREEYDVLDKRRGRDPEMGGKPRRKNPQEGLYNELQKDKMAEAYSEIGMKGERRRGKGHDGLYQGLSTATKDTYDALHMQALPPR

SEQ ID NO: 7251 - protein, 499 aa, Artificial Sequence
  source: /note="Description of Artificial Sequence: Synthetic Chimeric Antigen Receptor"
MALPVTALLLPLALLLHAARPEVQLVESGGGLVQPGRSLRLSCTASGFTFTDYYMSWVRQAPGKGLEWVGFIRSKADGYTTEYAASVKGRFTISRDDSKSIAYLQMNSLKTEDTAVYYCTRDAAYYSYYSPEGAMDYWGQGTLVTVSSGGGGSGGGGSGGGGSMADYKDIQMTQSPSSVSASVGDRVTITCRASQNVDSAVAWYQQKPGKAPKLLIYSASYGQSGVPSRFSGSGSGTDFTLTISSLQPEDFATYYCQQYYSTPWTFGQGTKVEIKRTTTPAPRPPTPAPTIASQPLSLRPEACRPAAGGAVHTRGLDFACDIYIWAPLAGTCGVLLLSLVITLYCKRGRKKLLYIFKQPFMRPVQTTQEEDGCSCRFPEEEEGGCELRVKFSRSADAPAYQQGQNQLYNELNLGRREEYDVLDKRRGRDPEMGGKPRRKNPQEGLYNELQKDKMAEAYSEIGMKGERRRGKGHDGLYQGLSTATKDTYDALHMQALPPR

SEQ ID NO: 7252 - protein, 531 aa, Artificial Sequence
  source: /note="Description of Artificial Sequence: Synthetic Chimeric Antigen Receptor"
MALPVTALLLPLALLLHAARPEVKLVESGGGLVQPGRSLRLSCTASGFTFTDYYMSWVRQAPGKGLEWVGLIRSKADGYTTEYSASVKGRFTISRDDSKSILYLQMNSLKTEDTAVYYCARDAAYYSYYSPEGAMDYWGQGTLVTVSSGGGGSGGGGSGGGGSMADYKDIVMTQSPSSVSASVGDRVTITCRASQNVDSAVAWYQQKPGKAPKALIYSASYRYSGVPSRFSGRGSGTDFTLTISSLQPEDFATYYCQQYYSTPWTFGQGTKVEIKREPKSPDKTHTCPPCPAPPVAGPSVFLFPPKPKDTLMIARTPEVTCVVVDVSHEDPEVKFNWYVDGVEVHNAKTKPREEQYNSTYRVVSVLTVLHQDWLNGKEYKCKVSNKALPAPIEKTISKAKGQPREPQVYTLPPSRDELTKNQVSLTCLVKGFYPSDIAVEWESNGQPENNYKTTPPVLDSDGSFFLYSKLTVDKSRWQQGNVFSCSVMHEALHNHYTQKSLSLSPGKIYIWAPLAGTCGVLLLSLVITLYC

SEQ ID NO: 7253 - protein, 531 aa, Artificial Sequence
  source: /note="Description of Artificial Sequence: Synthetic Chimeric Antigen Receptor"
MALPVTALLLPLALLLHAARPEVKLVESGGGLVQPGRSLRLSCTASGFTFTDYYMSWVRQAPGKGLEWVGLIRSKADGYTTEYSASVKGRFTISRDDSKSILYLQMNSLKTEDTAVYYCARDAAYYSYYSPEGAMDYWGQGTLVTVSSGGGGSGGGGSGGGGSMADYKDIQMTQSPSSVSASVGDRVTITCRASQNVDSAVAWYQQKPGKAPKALIYSASYRYSGVPSRFSGRGSGTDFTLTISSLQPEDFATYYCQQYYSTPWTFGQGTKVEIKREPKSPDKTHTCPPCPAPPVAGPSVFLFPPKPKDTLMIARTPEVTCVVVDVSHEDPEVKFNWYVDGVEVHNAKTKPREEQYNSTYRVVSVLTVLHQDWLNGKEYKCKVSNKALPAPIEKTISKAKGQPREPQVYTLPPSRDELTKNQVSLTCLVKGFYPSDIAVEWESNGQPENNYKTTPPVLDSDGSFFLYSKLTVDKSRWQQGNVFSCSVMHEALHNHYTQKSLSLSPGKIYIWAPLAGTCGVLLLSLVITLYC

SEQ ID NO: 7254 - protein, 531 aa, Artificial Sequence
  source: /note="Description of Artificial Sequence: Synthetic Chimeric Antigen Receptor"
MALPVTALLLPLALLLHAARPEVKLVESGGGLVQPGRSLRLSCTASGFTFTDYYMSWVRQAPGKGLEWVGLIRSKADGYTTEYSASVKGRFTISRDDSKSILYLQMNSLKTEDTAVYYCARDAAYYSYYSPEGAMDYWGQGTLVTVSSGGGGSGGGGSGGGGSMADYKDIQMTQSPSSVSASVGDRVTITCRASQNVDSAVAWYQQKPGKAPKALIYSASYRYSGVPSRFSGSGSGTDFTLTISSLQPEDFATYYCQQYYSTPWTFGQGTKVEIKREPKSPDKTHTCPPCPAPPVAGPSVFLFPPKPKDTLMIARTPEVTCVVVDVSHEDPEVKFNWYVDGVEVHNAKTKPREEQYNSTYRVVSVLTVLHQDWLNGKEYKCKVSNKALPAPIEKTISKAKGQPREPQVYTLPPSRDELTKNQVSLTCLVKGFYPSDIAVEWESNGQPENNYKTTPPVLDSDGSFFLYSKLTVDKSRWQQGNVFSCSVMHEALHNHYTQKSLSLSPGKIYIWAPLAGTCGVLLLSLVITLYC

SEQ ID NO: 7255 - protein, 531 aa, Artificial Sequence
  source: /note="Description of Artificial Sequence: Synthetic Chimeric Antigen Receptor"
MALPVTALLLPLALLLHAARPEVKLVESGGGLVQPGRSLRLSCTASGFTFTDYYMSWVRQAPGKGLEWVGLIRSKADGYTTEYSASVKGRFTISRDDSKSILYLQMNSLKTEDTAVYYCARDAAYYSYYSPEGAMDYWGQGTLVTVSSGGGGSGGGGSGGGGSMADYKDIQMTQSPSSVSASVGDRVTITCRASQNVDSAVAWYQQKPGKAPKLLIYSASYRYSGVPSRFSGSGSGTDFTLTISSLQPEDFATYYCQQYYSTPWTFGQGTKVEIKREPKSPDKTHTCPPCPAPPVAGPSVFLFPPKPKDTLMIARTPEVTCVVVDVSHEDPEVKFNWYVDGVEVHNAKTKPREEQYNSTYRVVSVLTVLHQDWLNGKEYKCKVSNKALPAPIEKTISKAKGQPREPQVYTLPPSRDELTKNQVSLTCLVKGFYPSDIAVEWESNGQPENNYKTTPPVLDSDGSFFLYSKLTVDKSRWQQGNVFSCSVMHEALHNHYTQKSLSLSPGKIYIWAPLAGTCGVLLLSLVITLYC

SEQ ID NO: 7256 - protein, 531 aa, Artificial Sequence
  source: /note="Description of Artificial Sequence: Synthetic Chimeric Antigen Receptor"
MALPVTALLLPLALLLHAARPEVKLVESGGGLVQPGRSLRLSCTASGFTFTDYYMSWVRQAPGKGLEWVGLIRSKADGYTTEYSASVKGRFTISRDDSKSILYLQMNSLKTEDTAVYYCARDAAYYSYYSPEGAMDYWGQGTLVTVSSGGGGSGGGGSGGGGSMADYKDIQMTQSPSSVSASVGDRVTITCRASQNVDSAVAWYQQKPGKAPKLLIYSASYRQSGVPSRFSGSGSGTDFTLTISSLQPEDFATYYCQQYYSTPWTFGQGTKVEIKREPKSPDKTHTCPPCPAPPVAGPSVFLFPPKPKDTLMIARTPEVTCVVVDVSHEDPEVKFNWYVDGVEVHNAKTKPREEQYNSTYRVVSVLTVLHQDWLNGKEYKCKVSNKALPAPIEKTISKAKGQPREPQVYTLPPSRDELTKNQVSLTCLVKGFYPSDIAVEWESNGQPENNYKTTPPVLDSDGSFFLYSKLTVDKSRWQQGNVFSCSVMHEALHNHYTQKSLSLSPGKIYIWAPLAGTCGVLLLSLVITLYC

SEQ ID NO: 7257 - protein, 531 aa, Artificial Sequence
  source: /note="Description of Artificial Sequence: Synthetic Chimeric Antigen Receptor"
MALPVTALLLPLALLLHAARPEVKLVESGGGLVQPGRSLRLSCTASGFTFTDYYMSWVRQAPGKGLEWVGLIRSKADGYTTEYSASVKGRFTISRDDSKSILYLQMNSLKTEDTAVYYCARDAAYYSYYSPEGAMDYWGQGTLVTVSSGGGGSGGGGSGGGGSMADYKDIQMTQSPSSVSASVGDRVTITCRASQNVDSAVAWYQQKPGKAPKLLIYSASYGQSGVPSRFSGSGSGTDFTLTISSLQPEDFATYYCQQYYSTPWTFGQGTKVEIKREPKSPDKTHTCPPCPAPPVAGPSVFLFPPKPKDTLMIARTPEVTCVVVDVSHEDPEVKFNWYVDGVEVHNAKTKPREEQYNSTYRVVSVLTVLHQDWLNGKEYKCKVSNKALPAPIEKTISKAKGQPREPQVYTLPPSRDELTKNQVSLTCLVKGFYPSDIAVEWESNGQPENNYKTTPPVLDSDGSFFLYSKLTVDKSRWQQGNVFSCSVMHEALHNHYTQKSLSLSPGKIYIWAPLAGTCGVLLLSLVITLYC

SEQ ID NO: 7258 - protein, 531 aa, Artificial Sequence
  source: /note="Description of Artificial Sequence: Synthetic Chimeric Antigen Receptor"
MALPVTALLLPLALLLHAARPEVQLVESGGGLVQPGRSLRLSCTASGFTFTDYYMSWVRQAPGKGLEWVGLIRSKADGYTTEYSASVKGRFTISRDDSKSILYLQMNSLKTEDTAVYYCARDAAYYSYYSPEGAMDYWGQGTLVTVSSGGGGSGGGGSGGGGSMADYKDIVMTQSPSSVSASVGDRVTITCRASQNVDSAVAWYQQKPGKAPKALIYSASYRYSGVPSRFSGRGSGTDFTLTISSLQPEDFATYYCQQYYSTPWTFGQGTKVEIKREPKSPDKTHTCPPCPAPPVAGPSVFLFPPKPKDTLMIARTPEVTCVVVDVSHEDPEVKFNWYVDGVEVHNAKTKPREEQYNSTYRVVSVLTVLHQDWLNGKEYKCKVSNKALPAPIEKTISKAKGQPREPQVYTLPPSRDELTKNQVSLTCLVKGFYPSDIAVEWESNGQPENNYKTTPPVLDSDGSFFLYSKLTVDKSRWQQGNVFSCSVMHEALHNHYTQKSLSLSPGKIYIWAPLAGTCGVLLLSLVITLYC

SEQ ID NO: 7259 - protein, 531 aa, Artificial Sequence
  source: /note="Description of Artificial Sequence: Synthetic Chimeric Antigen Receptor"
MALPVTALLLPLALLLHAARPEVQLVESGGGLVQPGRSLRLSCTASGFTFTDYYMSWVRQAPGKGLEWVGLIRSKADGYTTEYSASVKGRFTISRDDSKSILYLQMNSLKTEDTAVYYCARDAAYYSYYSPEGAMDYWGQGTLVTVSSGGGGSGGGGSGGGGSMADYKDIQMTQSPSSVSASVGDRVTITCRASQNVDSAVAWYQQKPGKAPKALIYSASYRYSGVPSRFSGRGSGTDFTLTISSLQPEDFATYYCQQYYSTPWTFGQGTKVEIKREPKSPDKTHTCPPCPAPPVAGPSVFLFPPKPKDTLMIARTPEVTCVVVDVSHEDPEVKFNWYVDGVEVHNAKTKPREEQYNSTYRVVSVLTVLHQDWLNGKEYKCKVSNKALPAPIEKTISKAKGQPREPQVYTLPPSRDELTKNQVSLTCLVKGFYPSDIAVEWESNGQPENNYKTTPPVLDSDGSFFLYSKLTVDKSRWQQGNVFSCSVMHEALHNHYTQKSLSLSPGKIYIWAPLAGTCGVLLLSLVITLYC

SEQ ID NO: 7260 - protein, 531 aa, Artificial Sequence
  source: /note="Description of Artificial Sequence: Synthetic Chimeric Antigen Receptor"
MALPVTALLLPLALLLHAARPEVQLVESGGGLVQPGRSLRLSCTASGFTFTDYYMSWVRQAPGKGLEWVGLIRSKADGYTTEYSASVKGRFTISRDDSKSILYLQMNSLKTEDTAVYYCARDAAYYSYYSPEGAMDYWGQGTLVTVSSGGGGSGGGGSGGGGSMADYKDIQMTQSPSSVSASVGDRVTITCRASQNVDSAVAWYQQKPGKAPKALIYSASYRYSGVPSRFSGSGSGTDFTLTISSLQPEDFATYYCQQYYSTPWTFGQGTKVEIKREPKSPDKTHTCPPCPAPPVAGPSVFLFPPKPKDTLMIARTPEVTCVVVDVSHEDPEVKFNWYVDGVEVHNAKTKPREEQYNSTYRVVSVLTVLHQDWLNGKEYKCKVSNKALPAPIEKTISKAKGQPREPQVYTLPPSRDELTKNQVSLTCLVKGFYPSDIAVEWESNGQPENNYKTTPPVLDSDGSFFLYSKLTVDKSRWQQGNVFSCSVMHEALHNHYTQKSLSLSPGKIYIWAPLAGTCGVLLLSLVITLYC

SEQ ID NO: 7261 - protein, 531 aa, Artificial Sequence
  source: /note="Description of Artificial Sequence: Synthetic Chimeric Antigen Receptor"
MALPVTALLLPLALLLHAARPEVQLVESGGGLVQPGRSLRLSCTASGFTFTDYYMSWVRQAPGKGLEWVGLIRSKADGYTTEYSASVKGRFTISRDDSKSILYLQMNSLKTEDTAVYYCARDAAYYSYYSPEGAMDYWGQGTLVTVSSGGGGSGGGGSGGGGSMADYKDIQMTQSPSSVSASVGDRVTITCRASQNVDSAVAWYQQKPGKAPKLLIYSASYRYSGVPSRFSGSGSGTDFTLTISSLQPEDFATYYCQQYYSTPWTFGQGTKVEIKREPKSPDKTHTCPPCPAPPVAGPSVFLFPPKPKDTLMIARTPEVTCVVVDVSHEDPEVKFNWYVDGVEVHNAKTKPREEQYNSTYRVVSVLTVLHQDWLNGKEYKCKVSNKALPAPIEKTISKAKGQPREPQVYTLPPSRDELTKNQVSLTCLVKGFYPSDIAVEWESNGQPENNYKTTPPVLDSDGSFFLYSKLTVDKSRWQQGNVFSCSVMHEALHNHYTQKSLSLSPGKIYIWAPLAGTCGVLLLSLVITLYC

SEQ ID NO: 7262 - protein, 531 aa, Artificial Sequence
  source: /note="Description of Artificial Sequence: Synthetic Chimeric Antigen Receptor"
MALPVTALLLPLALLLHAARPEVQLVESGGGLVQPGRSLRLSCTASGFTFTDYYMSWVRQAPGKGLEWVGLIRSKADGYTTEYSASVKGRFTISRDDSKSILYLQMNSLKTEDTAVYYCARDAAYYSYYSPEGAMDYWGQGTLVTVSSGGGGSGGGGSGGGGSMADYKDIQMTQSPSSVSASVGDRVTITCRASQNVDSAVAWYQQKPGKAPKLLIYSASYRQSGVPSRFSGSGSGTDFTLTISSLQPEDFATYYCQQYYSTPWTFGQGTKVEIKREPKSPDKTHTCPPCPAPPVAGPSVFLFPPKPKDTLMIARTPEVTCVVVDVSHEDPEVKFNWYVDGVEVHNAKTKPREEQYNSTYRVVSVLTVLHQDWLNGKEYKCKVSNKALPAPIEKTISKAKGQPREPQVYTLPPSRDELTKNQVSLTCLVKGFYPSDIAVEWESNGQPENNYKTTPPVLDSDGSFFLYSKLTVDKSRWQQGNVFSCSVMHEALHNHYTQKSLSLSPGKIYIWAPLAGTCGVLLLSLVITLYC

SEQ ID NO: 7263 - protein, 531 aa, Artificial Sequence
  source: /note="Description of Artificial Sequence: Synthetic Chimeric Antigen Receptor"
MALPVTALLLPLALLLHAARPEVQLVESGGGLVQPGRSLRLSCTASGFTFTDYYMSWVRQAPGKGLEWVGLIRSKADGYTTEYSASVKGRFTISRDDSKSILYLQMNSLKTEDTAVYYCARDAAYYSYYSPEGAMDYWGQGTLVTVSSGGGGSGGGGSGGGGSMADYKDIQMTQSPSSVSASVGDRVTITCRASQNVDSAVAWYQQKPGKAPKLLIYSASYGQSGVPSRFSGSGSGTDFTLTISSLQPEDFATYYCQQYYSTPWTFGQGTKVEIKREPKSPDKTHTCPPCPAPPVAGPSVFLFPPKPKDTLMIARTPEVTCVVVDVSHEDPEVKFNWYVDGVEVHNAKTKPREEQYNSTYRVVSVLTVLHQDWLNGKEYKCKVSNKALPAPIEKTISKAKGQPREPQVYTLPPSRDELTKNQVSLTCLVKGFYPSDIAVEWESNGQPENNYKTTPPVLDSDGSFFLYSKLTVDKSRWQQGNVFSCSVMHEALHNHYTQKSLSLSPGKIYIWAPLAGTCGVLLLSLVITLYC

SEQ ID NO: 7264 - protein, 531 aa, Artificial Sequence
  source: /note="Description of Artificial Sequence: Synthetic Chimeric Antigen Receptor"
MALPVTALLLPLALLLHAARPEVQLVESGGGLVQPGRSLRLSCTASGFTFTDYYMSWVRQAPGKGLEWVGLIRSKADGYTTEYSASVKGRFTISRDDSKSIAYLQMNSLKTEDTAVYYCARDAAYYSYYSPEGAMDYWGQGTLVTVSSGGGGSGGGGSGGGGSMADYKDIVMTQSPSSVSASVGDRVTITCRASQNVDSAVAWYQQKPGKAPKALIYSASYRYSGVPSRFSGRGSGTDFTLTISSLQPEDFATYYCQQYYSTPWTFGQGTKVEIKREPKSPDKTHTCPPCPAPPVAGPSVFLFPPKPKDTLMIARTPEVTCVVVDVSHEDPEVKFNWYVDGVEVHNAKTKPREEQYNSTYRVVSVLTVLHQDWLNGKEYKCKVSNKALPAPIEKTISKAKGQPREPQVYTLPPSRDELTKNQVSLTCLVKGFYPSDIAVEWESNGQPENNYKTTPPVLDSDGSFFLYSKLTVDKSRWQQGNVFSCSVMHEALHNHYTQKSLSLSPGKIYIWAPLAGTCGVLLLSLVITLYC

SEQ ID NO: 7265 - protein, 531 aa, Artificial Sequence
  source: /note="Description of Artificial Sequence: Synthetic Chimeric Antigen Receptor"
MALPVTALLLPLALLLHAARPEVQLVESGGGLVQPGRSLRLSCTASGFTFTDYYMSWVRQAPGKGLEWVGLIRSKADGYTTEYSASVKGRFTISRDDSKSIAYLQMNSLKTEDTAVYYCARDAAYYSYYSPEGAMDYWGQGTLVTVSSGGGGSGGGGSGGGGSMADYKDIQMTQSPSSVSASVGDRVTITCRASQNVDSAVAWYQQKPGKAPKALIYSASYRYSGVPSRFSGRGSGTDFTLTISSLQPEDFATYYCQQYYSTPWTFGQGTKVEIKREPKSPDKTHTCPPCPAPPVAGPSVFLFPPKPKDTLMIARTPEVTCVVVDVSHEDPEVKFNWYVDGVEVHNAKTKPREEQYNSTYRVVSVLTVLHQDWLNGKEYKCKVSNKALPAPIEKTISKAKGQPREPQVYTLPPSRDELTKNQVSLTCLVKGFYPSDIAVEWESNGQPENNYKTTPPVLDSDGSFFLYSKLTVDKSRWQQGNVFSCSVMHEALHNHYTQKSLSLSPGKIYIWAPLAGTCGVLLLSLVITLYC

SEQ ID NO: 7266 - protein, 531 aa, Artificial Sequence
  source: /note="Description of Artificial Sequence: Synthetic Chimeric Antigen Receptor"
MALPVTALLLPLALLLHAARPEVQLVESGGGLVQPGRSLRLSCTASGFTFTDYYMSWVRQAPGKGLEWVGLIRSKADGYTTEYSASVKGRFTISRDDSKSIAYLQMNSLKTEDTAVYYCARDAAYYSYYSPEGAMDYWGQGTLVTVSSGGGGSGGGGSGGGGSMADYKDIQMTQSPSSVSASVGDRVTITCRASQNVDSAVAWYQQKPGKAPKALIYSASYRYSGVPSRFSGSGSGTDFTLTISSLQPEDFATYYCQQYYSTPWTFGQGTKVEIKREPKSPDKTHTCPPCPAPPVAGPSVFLFPPKPKDTLMIARTPEVTCVVVDVSHEDPEVKFNWYVDGVEVHNAKTKPREEQYNSTYRVVSVLTVLHQDWLNGKEYKCKVSNKALPAPIEKTISKAKGQPREPQVYTLPPSRDELTKNQVSLTCLVKGFYPSDIAVEWESNGQPENNYKTTPPVLDSDGSFFLYSKLTVDKSRWQQGNVFSCSVMHEALHNHYTQKSLSLSPGKIYIWAPLAGTCGVLLLSLVITLYC

SEQ ID NO: 7267 - protein, 531 aa, Artificial Sequence
  source: /note="Description of Artificial Sequence: Synthetic Chimeric Antigen Receptor"
MALPVTALLLPLALLLHAARPEVQLVESGGGLVQPGRSLRLSCTASGFTFTDYYMSWVRQAPGKGLEWVGLIRSKADGYTTEYSASVKGRFTISRDDSKSIAYLQMNSLKTEDTAVYYCARDAAYYSYYSPEGAMDYWGQGTLVTVSSGGGGSGGGGSGGGGSMADYKDIQMTQSPSSVSASVGDRVTITCRASQNVDSAVAWYQQKPGKAPKLLIYSASYRYSGVPSRFSGSGSGTDFTLTISSLQPEDFATYYCQQYYSTPWTFGQGTKVEIKREPKSPDKTHTCPPCPAPPVAGPSVFLFPPKPKDTLMIARTPEVTCVVVDVSHEDPEVKFNWYVDGVEVHNAKTKPREEQYNSTYRVVSVLTVLHQDWLNGKEYKCKVSNKALPAPIEKTISKAKGQPREPQVYTLPPSRDELTKNQVSLTCLVKGFYPSDIAVEWESNGQPENNYKTTPPVLDSDGSFFLYSKLTVDKSRWQQGNVFSCSVMHEALHNHYTQKSLSLSPGKIYIWAPLAGTCGVLLLSLVITLYC

SEQ ID NO: 7268 - protein, 531 aa, Artificial Sequence
  source: /note="Description of Artificial Sequence: Synthetic Chimeric Antigen Receptor"
MALPVTALLLPLALLLHAARPEVQLVESGGGLVQPGRSLRLSCTASGFTFTDYYMSWVRQAPGKGLEWVGLIRSKADGYTTEYSASVKGRFTISRDDSKSIAYLQMNSLKTEDTAVYYCARDAAYYSYYSPEGAMDYWGQGTLVTVSSGGGGSGGGGSGGGGSMADYKDIQMTQSPSSVSASVGDRVTITCRASQNVDSAVAWYQQKPGKAPKLLIYSASYRQSGVPSRFSGSGSGTDFTLTISSLQPEDFATYYCQQYYSTPWTFGQGTKVEIKREPKSPDKTHTCPPCPAPPVAGPSVFLFPPKPKDTLMIARTPEVTCVVVDVSHEDPEVKFNWYVDGVEVHNAKTKPREEQYNSTYRVVSVLTVLHQDWLNGKEYKCKVSNKALPAPIEKTISKAKGQPREPQVYTLPPSRDELTKNQVSLTCLVKGFYPSDIAVEWESNGQPENNYKTTPPVLDSDGSFFLYSKLTVDKSRWQQGNVFSCSVMHEALHNHYTQKSLSLSPGKIYIWAPLAGTCGVLLLSLVITLYC

SEQ ID NO: 7269 - protein, 531 aa, Artificial Sequence
  source: /note="Description of Artificial Sequence: Synthetic Chimeric Antigen Receptor"
MALPVTALLLPLALLLHAARPEVQLVESGGGLVQPGRSLRLSCTASGFTFTDYYMSWVRQAPGKGLEWVGLIRSKADGYTTEYSASVKGRFTISRDDSKSIAYLQMNSLKTEDTAVYYCARDAAYYSYYSPEGAMDYWGQGTLVTVSSGGGGSGGGGSGGGGSMADYKDIQMTQSPSSVSASVGDRVTITCRASQNVDSAVAWYQQKPGKAPKLLIYSASYGQSGVPSRFSGSGSGTDFTLTISSLQPEDFATYYCQQYYSTPWTFGQGTKVEIKREPKSPDKTHTCPPCPAPPVAGPSVFLFPPKPKDTLMIARTPEVTCVVVDVSHEDPEVKFNWYVDGVEVHNAKTKPREEQYNSTYRVVSVLTVLHQDWLNGKEYKCKVSNKALPAPIEKTISKAKGQPREPQVYTLPPSRDELTKNQVSLTCLVKGFYPSDIAVEWESNGQPENNYKTTPPVLDSDGSFFLYSKLTVDKSRWQQGNVFSCSVMHEALHNHYTQKSLSLSPGKIYIWAPLAGTCGVLLLSLVITLYC

SEQ ID NO: 7270 - protein, 531 aa, Artificial Sequence
  source: /note="Description of Artificial Sequence: Synthetic Chimeric Antigen Receptor"
MALPVTALLLPLALLLHAARPEVQLVESGGGLVQPGRSLRLSCTASGFTFTDYYMSWVRQAPGKGLEWVGFIRSKADGYTTEYSASVKGRFTISRDDSKSIAYLQMNSLKTEDTAVYYCARDAAYYSYYSPEGAMDYWGQGTLVTVSSGGGGSGGGGSGGGGSMADYKDIVMTQSPSSVSASVGDRVTITCRASQNVDSAVAWYQQKPGKAPKALIYSASYRYSGVPSRFSGRGSGTDFTLTISSLQPEDFATYYCQQYYSTPWTFGQGTKVEIKREPKSPDKTHTCPPCPAPPVAGPSVFLFPPKPKDTLMIARTPEVTCVVVDVSHEDPEVKFNWYVDGVEVHNAKTKPREEQYNSTYRVVSVLTVLHQDWLNGKEYKCKVSNKALPAPIEKTISKAKGQPREPQVYTLPPSRDELTKNQVSLTCLVKGFYPSDIAVEWESNGQPENNYKTTPPVLDSDGSFFLYSKLTVDKSRWQQGNVFSCSVMHEALHNHYTQKSLSLSPGKIYIWAPLAGTCGVLLLSLVITLYC

SEQ ID NO: 7271 - protein, 531 aa, Artificial Sequence
  source: /note="Description of Artificial Sequence: Synthetic Chimeric Antigen Receptor"
MALPVTALLLPLALLLHAARPEVQLVESGGGLVQPGRSLRLSCTASGFTFTDYYMSWVRQAPGKGLEWVGFIRSKADGYTTEYSASVKGRFTISRDDSKSIAYLQMNSLKTEDTAVYYCARDAAYYSYYSPEGAMDYWGQGTLVTVSSGGGGSGGGGSGGGGSMADYKDIQMTQSPSSVSASVGDRVTITCRASQNVDSAVAWYQQKPGKAPKALIYSASYRYSGVPSRFSGRGSGTDFTLTISSLQPEDFATYYCQQYYSTPWTFGQGTKVEIKREPKSPDKTHTCPPCPAPPVAGPSVFLFPPKPKDTLMIARTPEVTCVVVDVSHEDPEVKFNWYVDGVEVHNAKTKPREEQYNSTYRVVSVLTVLHQDWLNGKEYKCKVSNKALPAPIEKTISKAKGQPREPQVYTLPPSRDELTKNQVSLTCLVKGFYPSDIAVEWESNGQPENNYKTTPPVLDSDGSFFLYSKLTVDKSRWQQGNVFSCSVMHEALHNHYTQKSLSLSPGKIYIWAPLAGTCGVLLLSLVITLYC

SEQ ID NO: 7272 - protein, 531 aa, Artificial Sequence
  source: /note="Description of Artificial Sequence: Synthetic Chimeric Antigen Receptor"
MALPVTALLLPLALLLHAARPEVQLVESGGGLVQPGRSLRLSCTASGFTFTDYYMSWVRQAPGKGLEWVGFIRSKADGYTTEYSASVKGRFTISRDDSKSIAYLQMNSLKTEDTAVYYCARDAAYYSYYSPEGAMDYWGQGTLVTVSSGGGGSGGGGSGGGGSMADYKDIQMTQSPSSVSASVGDRVTITCRASQNVDSAVAWYQQKPGKAPKALIYSASYRYSGVPSRFSGSGSGTDFTLTISSLQPEDFATYYCQQYYSTPWTFGQGTKVEIKREPKSPDKTHTCPPCPAPPVAGPSVFLFPPKPKDTLMIARTPEVTCVVVDVSHEDPEVKFNWYVDGVEVHNAKTKPREEQYNSTYRVVSVLTVLHQDWLNGKEYKCKVSNKALPAPIEKTISKAKGQPREPQVYTLPPSRDELTKNQVSLTCLVKGFYPSDIAVEWESNGQPENNYKTTPPVLDSDGSFFLYSKLTVDKSRWQQGNVFSCSVMHEALHNHYTQKSLSLSPGKIYIWAPLAGTCGVLLLSLVITLYC

SEQ ID NO: 7273 - protein, 531 aa, Artificial Sequence
  source: /note="Description of Artificial Sequence: Synthetic Chimeric Antigen Receptor"
MALPVTALLLPLALLLHAARPEVQLVESGGGLVQPGRSLRLSCTASGFTFTDYYMSWVRQAPGKGLEWVGFIRSKADGYTTEYSASVKGRFTISRDDSKSIAYLQMNSLKTEDTAVYYCARDAAYYSYYSPEGAMDYWGQGTLVTVSSGGGGSGGGGSGGGGSMADYKDIQMTQSPSSVSASVGDRVTITCRASQNVDSAVAWYQQKPGKAPKLLIYSASYRYSGVPSRFSGSGSGTDFTLTISSLQPEDFATYYCQQYYSTPWTFGQGTKVEIKREPKSPDKTHTCPPCPAPPVAGPSVFLFPPKPKDTLMIARTPEVTCVVVDVSHEDPEVKFNWYVDGVEVHNAKTKPREEQYNSTYRVVSVLTVLHQDWLNGKEYKCKVSNKALPAPIEKTISKAKGQPREPQVYTLPPSRDELTKNQVSLTCLVKGFYPSDIAVEWESNGQPENNYKTTPPVLDSDGSFFLYSKLTVDKSRWQQGNVFSCSVMHEALHNHYTQKSLSLSPGKIYIWAPLAGTCGVLLLSLVITLYC

SEQ ID NO: 7274 - protein, 531 aa, Artificial Sequence
  source: /note="Description of Artificial Sequence: Synthetic Chimeric Antigen Receptor"
MALPVTALLLPLALLLHAARPEVQLVESGGGLVQPGRSLRLSCTASGFTFTDYYMSWVRQAPGKGLEWVGFIRSKADGYTTEYSASVKGRFTISRDDSKSIAYLQMNSLKTEDTAVYYCARDAAYYSYYSPEGAMDYWGQGTLVTVSSGGGGSGGGGSGGGGSMADYKDIQMTQSPSSVSASVGDRVTITCRASQNVDSAVAWYQQKPGKAPKLLIYSASYRQSGVPSRFSGSGSGTDFTLTISSLQPEDFATYYCQQYYSTPWTFGQGTKVEIKREPKSPDKTHTCPPCPAPPVAGPSVFLFPPKPKDTLMIARTPEVTCVVVDVSHEDPEVKFNWYVDGVEVHNAKTKPREEQYNSTYRVVSVLTVLHQDWLNGKEYKCKVSNKALPAPIEKTISKAKGQPREPQVYTLPPSRDELTKNQVSLTCLVKGFYPSDIAVEWESNGQPENNYKTTPPVLDSDGSFFLYSKLTVDKSRWQQGNVFSCSVMHEALHNHYTQKSLSLSPGKIYIWAPLAGTCGVLLLSLVITLYC

SEQ ID NO: 7275 - protein, 531 aa, Artificial Sequence
  source: /note="Description of Artificial Sequence: Synthetic Chimeric Antigen Receptor"
MALPVTALLLPLALLLHAARPEVQLVESGGGLVQPGRSLRLSCTASGFTFTDYYMSWVRQAPGKGLEWVGFIRSKADGYTTEYSASVKGRFTISRDDSKSIAYLQMNSLKTEDTAVYYCARDAAYYSYYSPEGAMDYWGQGTLVTVSSGGGGSGGGGSGGGGSMADYKDIQMTQSPSSVSASVGDRVTITCRASQNVDSAVAWYQQKPGKAPKLLIYSASYGQSGVPSRFSGSGSGTDFTLTISSLQPEDFATYYCQQYYSTPWTFGQGTKVEIKREPKSPDKTHTCPPCPAPPVAGPSVFLFPPKPKDTLMIARTPEVTCVVVDVSHEDPEVKFNWYVDGVEVHNAKTKPREEQYNSTYRVVSVLTVLHQDWLNGKEYKCKVSNKALPAPIEKTISKAKGQPREPQVYTLPPSRDELTKNQVSLTCLVKGFYPSDIAVEWESNGQPENNYKTTPPVLDSDGSFFLYSKLTVDKSRWQQGNVFSCSVMHEALHNHYTQKSLSLSPGKIYIWAPLAGTCGVLLLSLVITLYC

SEQ ID NO: 7276 - protein, 531 aa, Artificial Sequence
  source: /note="Description of Artificial Sequence: Synthetic Chimeric Antigen Receptor"
MALPVTALLLPLALLLHAARPEVQLVESGGGLVQPGRSLRLSCTASGFTFTDYYMSWVRQAPGKGLEWVGFIRSKADGYTTEYAASVKGRFTISRDDSKSIAYLQMNSLKTEDTAVYYCARDAAYYSYYSPEGAMDYWGQGTLVTVSSGGGGSGGGGSGGGGSMADYKDIVMTQSPSSVSASVGDRVTITCRASQNVDSAVAWYQQKPGKAPKALIYSASYRYSGVPSRFSGRGSGTDFTLTISSLQPEDFATYYCQQYYSTPWTFGQGTKVEIKREPKSPDKTHTCPPCPAPPVAGPSVFLFPPKPKDTLMIARTPEVTCVVVDVSHEDPEVKFNWYVDGVEVHNAKTKPREEQYNSTYRVVSVLTVLHQDWLNGKEYKCKVSNKALPAPIEKTISKAKGQPREPQVYTLPPSRDELTKNQVSLTCLVKGFYPSDIAVEWESNGQPENNYKTTPPVLDSDGSFFLYSKLTVDKSRWQQGNVFSCSVMHEALHNHYTQKSLSLSPGKIYIWAPLAGTCGVLLLSLVITLYC

SEQ ID NO: 7277 - protein, 531 aa, Artificial Sequence
  source: /note="Description of Artificial Sequence: Synthetic Chimeric Antigen Receptor"
MALPVTALLLPLALLLHAARPEVQLVESGGGLVQPGRSLRLSCTASGFTFTDYYMSWVRQAPGKGLEWVGFIRSKADGYTTEYAASVKGRFTISRDDSKSIAYLQMNSLKTEDTAVYYCARDAAYYSYYSPEGAMDYWGQGTLVTVSSGGGGSGGGGSGGGGSMADYKDIQMTQSPSSVSASVGDRVTITCRASQNVDSAVAWYQQKPGKAPKALIYSASYRYSGVPSRFSGRGSGTDFTLTISSLQPEDFATYYCQQYYSTPWTFGQGTKVEIKREPKSPDKTHTCPPCPAPPVAGPSVFLFPPKPKDTLMIARTPEVTCVVVDVSHEDPEVKFNWYVDGVEVHNAKTKPREEQYNSTYRVVSVLTVLHQDWLNGKEYKCKVSNKALPAPIEKTISKAKGQPREPQVYTLPPSRDELTKNQVSLTCLVKGFYPSDIAVEWESNGQPENNYKTTPPVLDSDGSFFLYSKLTVDKSRWQQGNVFSCSVMHEALHNHYTQKSLSLSPGKIYIWAPLAGTCGVLLLSLVITLYC

SEQ ID NO: 7278 - protein, 531 aa, Artificial Sequence
  source: /note="Description of Artificial Sequence: Synthetic Chimeric Antigen Receptor"
MALPVTALLLPLALLLHAARPEVQLVESGGGLVQPGRSLRLSCTASGFTFTDYYMSWVRQAPGKGLEWVGFIRSKADGYTTEYAASVKGRFTISRDDSKSIAYLQMNSLKTEDTAVYYCARDAAYYSYYSPEGAMDYWGQGTLVTVSSGGGGSGGGGSGGGGSMADYKDIQMTQSPSSVSASVGDRVTITCRASQNVDSAVAWYQQKPGKAPKALIYSASYRYSGVPSRFSGSGSGTDFTLTISSLQPEDFATYYCQQYYSTPWTFGQGTKVEIKREPKSPDKTHTCPPCPAPPVAGPSVFLFPPKPKDTLMIARTPEVTCVVVDVSHEDPEVKFNWYVDGVEVHNAKTKPREEQYNSTYRVVSVLTVLHQDWLNGKEYKCKVSNKALPAPIEKTISKAKGQPREPQVYTLPPSRDELTKNQVSLTCLVKGFYPSDIAVEWESNGQPENNYKTTPPVLDSDGSFFLYSKLTVDKSRWQQGNVFSCSVMHEALHNHYTQKSLSLSPGKIYIWAPLAGTCGVLLLSLVITLYC

SEQ ID NO: 7279 - protein, 531 aa, Artificial Sequence
  source: /note="Description of Artificial Sequence: Synthetic Chimeric Antigen Receptor"
MALPVTALLLPLALLLHAARPEVQLVESGGGLVQPGRSLRLSCTASGFTFTDYYMSWVRQAPGKGLEWVGFIRSKADGYTTEYAASVKGRFTISRDDSKSIAYLQMNSLKTEDTAVYYCARDAAYYSYYSPEGAMDYWGQGTLVTVSSGGGGSGGGGSGGGGSMADYKDIQMTQSPSSVSASVGDRVTITCRASQNVDSAVAWYQQKPGKAPKLLIYSASYRYSGVPSRFSGSGSGTDFTLTISSLQPEDFATYYCQQYYSTPWTFGQGTKVEIKREPKSPDKTHTCPPCPAPPVAGPSVFLFPPKPKDTLMIARTPEVTCVVVDVSHEDPEVKFNWYVDGVEVHNAKTKPREEQYNSTYRVVSVLTVLHQDWLNGKEYKCKVSNKALPAPIEKTISKAKGQPREPQVYTLPPSRDELTKNQVSLTCLVKGFYPSDIAVEWESNGQPENNYKTTPPVLDSDGSFFLYSKLTVDKSRWQQGNVFSCSVMHEALHNHYTQKSLSLSPGKIYIWAPLAGTCGVLLLSLVITLYC

SEQ ID NO: 7280 - protein, 531 aa, Artificial Sequence
  source: /note="Description of Artificial Sequence: Synthetic Chimeric Antigen Receptor"
MALPVTALLLPLALLLHAARPEVQLVESGGGLVQPGRSLRLSCTASGFTFTDYYMSWVRQAPGKGLEWVGFIRSKADGYTTEYAASVKGRFTISRDDSKSIAYLQMNSLKTEDTAVYYCARDAAYYSYYSPEGAMDYWGQGTLVTVSSGGGGSGGGGSGGGGSMADYKDIQMTQSPSSVSASVGDRVTITCRASQNVDSAVAWYQQKPGKAPKLLIYSASYRQSGVPSRFSGSGSGTDFTLTISSLQPEDFATYYCQQYYSTPWTFGQGTKVEIKREPKSPDKTHTCPPCPAPPVAGPSVFLFPPKPKDTLMIARTPEVTCVVVDVSHEDPEVKFNWYVDGVEVHNAKTKPREEQYNSTYRVVSVLTVLHQDWLNGKEYKCKVSNKALPAPIEKTISKAKGQPREPQVYTLPPSRDELTKNQVSLTCLVKGFYPSDIAVEWESNGQPENNYKTTPPVLDSDGSFFLYSKLTVDKSRWQQGNVFSCSVMHEALHNHYTQKSLSLSPGKIYIWAPLAGTCGVLLLSLVITLYC

SEQ ID NO: 7281 - protein, 531 aa, Artificial Sequence
  source: /note="Description of Artificial Sequence: Synthetic Chimeric Antigen Receptor"
MALPVTALLLPLALLLHAARPEVQLVESGGGLVQPGRSLRLSCTASGFTFTDYYMSWVRQAPGKGLEWVGFIRSKADGYTTEYAASVKGRFTISRDDSKSIAYLQMNSLKTEDTAVYYCARDAAYYSYYSPEGAMDYWGQGTLVTVSSGGGGSGGGGSGGGGSMADYKDIQMTQSPSSVSASVGDRVTITCRASQNVDSAVAWYQQKPGKAPKLLIYSASYGQSGVPSRFSGSGSGTDFTLTISSLQPEDFATYYCQQYYSTPWTFGQGTKVEIKREPKSPDKTHTCPPCPAPPVAGPSVFLFPPKPKDTLMIARTPEVTCVVVDVSHEDPEVKFNWYVDGVEVHNAKTKPREEQYNSTYRVVSVLTVLHQDWLNGKEYKCKVSNKALPAPIEKTISKAKGQPREPQVYTLPPSRDELTKNQVSLTCLVKGFYPSDIAVEWESNGQPENNYKTTPPVLDSDGSFFLYSKLTVDKSRWQQGNVFSCSVMHEALHNHYTQKSLSLSPGKIYIWAPLAGTCGVLLLSLVITLYC

SEQ ID NO: 7282 - protein, 531 aa, Artificial Sequence
  source: /note="Description of Artificial Sequence: Synthetic Chimeric Antigen Receptor"
MALPVTALLLPLALLLHAARPEVQLVESGGGLVQPGRSLRLSCTASGFTFTDYYMSWVRQAPGKGLEWVGLIRSKADGYTTEYAASVKGRFTISRDDSKSIAYLQMNSLKTEDTAVYYCARDAAYYSYYSPEGAMDYWGQGTLVTVSSGGGGSGGGGSGGGGSMADYKDIVMTQSPSSVSASVGDRVTITCRASQNVDSAVAWYQQKPGKAPKALIYSASYRYSGVPSRFSGRGSGTDFTLTISSLQPEDFATYYCQQYYSTPWTFGQGTKVEIKREPKSPDKTHTCPPCPAPPVAGPSVFLFPPKPKDTLMIARTPEVTCVVVDVSHEDPEVKFNWYVDGVEVHNAKTKPREEQYNSTYRVVSVLTVLHQDWLNGKEYKCKVSNKALPAPIEKTISKAKGQPREPQVYTLPPSRDELTKNQVSLTCLVKGFYPSDIAVEWESNGQPENNYKTTPPVLDSDGSFFLYSKLTVDKSRWQQGNVFSCSVMHEALHNHYTQKSLSLSPGKIYIWAPLAGTCGVLLLSLVITLYC

SEQ ID NO: 7283 - protein, 531 aa, Artificial Sequence
  source: /note="Description of Artificial Sequence: Synthetic Chimeric Antigen Receptor"
MALPVTALLLPLALLLHAARPEVQLVESGGGLVQPGRSLRLSCTASGFTFTDYYMSWVRQAPGKGLEWVGLIRSKADGYTTEYAASVKGRFTISRDDSKSIAYLQMNSLKTEDTAVYYCARDAAYYSYYSPEGAMDYWGQGTLVTVSSGGGGSGGGGSGGGGSMADYKDIQMTQSPSSVSASVGDRVTITCRASQNVDSAVAWYQQKPGKAPKALIYSASYRYSGVPSRFSGRGSGTDFTLTISSLQPEDFATYYCQQYYSTPWTFGQGTKVEIKREPKSPDKTHTCPPCPAPPVAGPSVFLFPPKPKDTLMIARTPEVTCVVVDVSHEDPEVKFNWYVDGVEVHNAKTKPREEQYNSTYRVVSVLTVLHQDWLNGKEYKCKVSNKALPAPIEKTISKAKGQPREPQVYTLPPSRDELTKNQVSLTCLVKGFYPSDIAVEWESNGQPENNYKTTPPVLDSDGSFFLYSKLTVDKSRWQQGNVFSCSVMHEALHNHYTQKSLSLSPGKIYIWAPLAGTCGVLLLSLVITLYC

SEQ ID NO: 7284 - protein, 531 aa, Artificial Sequence
  source: /note="Description of Artificial Sequence: Synthetic Chimeric Antigen Receptor"
MALPVTALLLPLALLLHAARPEVQLVESGGGLVQPGRSLRLSCTASGFTFTDYYMSWVRQAPGKGLEWVGLIRSKADGYTTEYAASVKGRFTISRDDSKSIAYLQMNSLKTEDTAVYYCARDAAYYSYYSPEGAMDYWGQGTLVTVSSGGGGSGGGGSGGGGSMADYKDIQMTQSPSSVSASVGDRVTITCRASQNVDSAVAWYQQKPGKAPKALIYSASYRYSGVPSRFSGSGSGTDFTLTISSLQPEDFATYYCQQYYSTPWTFGQGTKVEIKREPKSPDKTHTCPPCPAPPVAGPSVFLFPPKPKDTLMIARTPEVTCVVVDVSHEDPEVKFNWYVDGVEVHNAKTKPREEQYNSTYRVVSVLTVLHQDWLNGKEYKCKVSNKALPAPIEKTISKAKGQPREPQVYTLPPSRDELTKNQVSLTCLVKGFYPSDIAVEWESNGQPENNYKTTPPVLDSDGSFFLYSKLTVDKSRWQQGNVFSCSVMHEALHNHYTQKSLSLSPGKIYIWAPLAGTCGVLLLSLVITLYC

SEQ ID NO: 7285 - protein, 531 aa, Artificial Sequence
  source: /note="Description of Artificial Sequence: Synthetic Chimeric Antigen Receptor"
MALPVTALLLPLALLLHAARPEVQLVESGGGLVQPGRSLRLSCTASGFTFTDYYMSWVRQAPGKGLEWVGLIRSKADGYTTEYAASVKGRFTISRDDSKSIAYLQMNSLKTEDTAVYYCARDAAYYSYYSPEGAMDYWGQGTLVTVSSGGGGSGGGGSGGGGSMADYKDIQMTQSPSSVSASVGDRVTITCRASQNVDSAVAWYQQKPGKAPKLLIYSASYRYSGVPSRFSGSGSGTDFTLTISSLQPEDFATYYCQQYYSTPWTFGQGTKVEIKREPKSPDKTHTCPPCPAPPVAGPSVFLFPPKPKDTLMIARTPEVTCVVVDVSHEDPEVKFNWYVDGVEVHNAKTKPREEQYNSTYRVVSVLTVLHQDWLNGKEYKCKVSNKALPAPIEKTISKAKGQPREPQVYTLPPSRDELTKNQVSLTCLVKGFYPSDIAVEWESNGQPENNYKTTPPVLDSDGSFFLYSKLTVDKSRWQQGNVFSCSVMHEALHNHYTQKSLSLSPGKIYIWAPLAGTCGVLLLSLVITLYC

SEQ ID NO: 7286 - protein, 531 aa, Artificial Sequence
  source: /note="Description of Artificial Sequence: Synthetic Chimeric Antigen Receptor"
MALPVTALLLPLALLLHAARPEVQLVESGGGLVQPGRSLRLSCTASGFTFTDYYMSWVRQAPGKGLEWVGLIRSKADGYTTEYAASVKGRFTISRDDSKSIAYLQMNSLKTEDTAVYYCARDAAYYSYYSPEGAMDYWGQGTLVTVSSGGGGSGGGGSGGGGSMADYKDIQMTQSPSSVSASVGDRVTITCRASQNVDSAVAWYQQKPGKAPKLLIYSASYRQSGVPSRFSGSGSGTDFTLTISSLQPEDFATYYCQQYYSTPWTFGQGTKVEIKREPKSPDKTHTCPPCPAPPVAGPSVFLFPPKPKDTLMIARTPEVTCVVVDVSHEDPEVKFNWYVDGVEVHNAKTKPREEQYNSTYRVVSVLTVLHQDWLNGKEYKCKVSNKALPAPIEKTISKAKGQPREPQVYTLPPSRDELTKNQVSLTCLVKGFYPSDIAVEWESNGQPENNYKTTPPVLDSDGSFFLYSKLTVDKSRWQQGNVFSCSVMHEALHNHYTQKSLSLSPGKIYIWAPLAGTCGVLLLSLVITLYC

SEQ ID NO: 7287 - protein, 531 aa, Artificial Sequence
  source: /note="Description of Artificial Sequence: Synthetic Chimeric Antigen Receptor"
MALPVTALLLPLALLLHAARPEVQLVESGGGLVQPGRSLRLSCTASGFTFTDYYMSWVRQAPGKGLEWVGLIRSKADGYTTEYAASVKGRFTISRDDSKSIAYLQMNSLKTEDTAVYYCARDAAYYSYYSPEGAMDYWGQGTLVTVSSGGGGSGGGGSGGGGSMADYKDIQMTQSPSSVSASVGDRVTITCRASQNVDSAVAWYQQKPGKAPKLLIYSASYGQSGVPSRFSGSGSGTDFTLTISSLQPEDFATYYCQQYYSTPWTFGQGTKVEIKREPKSPDKTHTCPPCPAPPVAGPSVFLFPPKPKDTLMIARTPEVTCVVVDVSHEDPEVKFNWYVDGVEVHNAKTKPREEQYNSTYRVVSVLTVLHQDWLNGKEYKCKVSNKALPAPIEKTISKAKGQPREPQVYTLPPSRDELTKNQVSLTCLVKGFYPSDIAVEWESNGQPENNYKTTPPVLDSDGSFFLYSKLTVDKSRWQQGNVFSCSVMHEALHNHYTQKSLSLSPGKIYIWAPLAGTCGVLLLSLVITLYC

SEQ ID NO: 7288 - protein, 531 aa, Artificial Sequence
  source: /note="Description of Artificial Sequence: Synthetic Chimeric Antigen Receptor"
MALPVTALLLPLALLLHAARPEVQLVESGGGLVQPGRSLRLSCTASGFTFTDYYMSWVRQAPGKGLEWVGFIRSKADGYTTEYAASVKGRFTISRDDSKSIAYLQMNSLKTEDTAVYYCTRDAAYYSYYSPEGAMDYWGQGTLVTVSSGGGGSGGGGSGGGGSMADYKDIVMTQSPSSVSASVGDRVTITCRASQNVDSAVAWYQQKPGKAPKALIYSASYRYSGVPSRFSGRGSGTDFTLTISSLQPEDFATYYCQQYYSTPWTFGQGTKVEIKREPKSPDKTHTCPPCPAPPVAGPSVFLFPPKPKDTLMIARTPEVTCVVVDVSHEDPEVKFNWYVDGVEVHNAKTKPREEQYNSTYRVVSVLTVLHQDWLNGKEYKCKVSNKALPAPIEKTISKAKGQPREPQVYTLPPSRDELTKNQVSLTCLVKGFYPSDIAVEWESNGQPENNYKTTPPVLDSDGSFFLYSKLTVDKSRWQQGNVFSCSVMHEALHNHYTQKSLSLSPGKIYIWAPLAGTCGVLLLSLVITLYC

SEQ ID NO: 7289 - protein, 531 aa, Artificial Sequence
  source: /note="Description of Artificial Sequence: Synthetic Chimeric Antigen Receptor"
MALPVTALLLPLALLLHAARPEVQLVESGGGLVQPGRSLRLSCTASGFTFTDYYMSWVRQAPGKGLEWVGFIRSKADGYTTEYAASVKGRFTISRDDSKSIAYLQMNSLKTEDTAVYYCTRDAAYYSYYSPEGAMDYWGQGTLVTVSSGGGGSGGGGSGGGGSMADYKDIQMTQSPSSVSASVGDRVTITCRASQNVDSAVAWYQQKPGKAPKALIYSASYRYSGVPSRFSGRGSGTDFTLTISSLQPEDFATYYCQQYYSTPWTFGQGTKVEIKREPKSPDKTHTCPPCPAPPVAGPSVFLFPPKPKDTLMIARTPEVTCVVVDVSHEDPEVKFNWYVDGVEVHNAKTKPREEQYNSTYRVVSVLTVLHQDWLNGKEYKCKVSNKALPAPIEKTISKAKGQPREPQVYTLPPSRDELTKNQVSLTCLVKGFYPSDIAVEWESNGQPENNYKTTPPVLDSDGSFFLYSKLTVDKSRWQQGNVFSCSVMHEALHNHYTQKSLSLSPGKIYIWAPLAGTCGVLLLSLVITLYC

SEQ ID NO: 7290 - protein, 531 aa, Artificial Sequence
  source: /note="Description of Artificial Sequence: Synthetic Chimeric Antigen Receptor"
MALPVTALLLPLALLLHAARPEVQLVESGGGLVQPGRSLRLSCTASGFTFTDYYMSWVRQAPGKGLEWVGFIRSKADGYTTEYAASVKGRFTISRDDSKSIAYLQMNSLKTEDTAVYYCTRDAAYYSYYSPEGAMDYWGQGTLVTVSSGGGGSGGGGSGGGGSMADYKDIQMTQSPSSVSASVGDRVTITCRASQNVDSAVAWYQQKPGKAPKALIYSASYRYSGVPSRFSGSGSGTDFTLTISSLQPEDFATYYCQQYYSTPWTFGQGTKVEIKREPKSPDKTHTCPPCPAPPVAGPSVFLFPPKPKDTLMIARTPEVTCVVVDVSHEDPEVKFNWYVDGVEVHNAKTKPREEQYNSTYRVVSVLTVLHQDWLNGKEYKCKVSNKALPAPIEKTISKAKGQPREPQVYTLPPSRDELTKNQVSLTCLVKGFYPSDIAVEWESNGQPENNYKTTPPVLDSDGSFFLYSKLTVDKSRWQQGNVFSCSVMHEALHNHYTQKSLSLSPGKIYIWAPLAGTCGVLLLSLVITLYC

SEQ ID NO: 7291 - protein, 531 aa, Artificial Sequence
  source: /note="Description of Artificial Sequence: Synthetic Chimeric Antigen Receptor"
MALPVTALLLPLALLLHAARPEVQLVESGGGLVQPGRSLRLSCTASGFTFTDYYMSWVRQAPGKGLEWVGFIRSKADGYTTEYAASVKGRFTISRDDSKSIAYLQMNSLKTEDTAVYYCTRDAAYYSYYSPEGAMDYWGQGTLVTVSSGGGGSGGGGSGGGGSMADYKDIQMTQSPSSVSASVGDRVTITCRASQNVDSAVAWYQQKPGKAPKLLIYSASYRYSGVPSRFSGSGSGTDFTLTISSLQPEDFATYYCQQYYSTPWTFGQGTKVEIKREPKSPDKTHTCPPCPAPPVAGPSVFLFPPKPKDTLMIARTPEVTCVVVDVSHEDPEVKFNWYVDGVEVHNAKTKPREEQYNSTYRVVSVLTVLHQDWLNGKEYKCKVSNKALPAPIEKTISKAKGQPREPQVYTLPPSRDELTKNQVSLTCLVKGFYPSDIAVEWESNGQPENNYKTTPPVLDSDGSFFLYSKLTVDKSRWQQGNVFSCSVMHEALHNHYTQKSLSLSPGKIYIWAPLAGTCGVLLLSLVITLYC

SEQ ID NO: 7292 - protein, 531 aa, Artificial Sequence
  source: /note="Description of Artificial Sequence: Synthetic Chimeric Antigen Receptor"
MALPVTALLLPLALLLHAARPEVQLVESGGGLVQPGRSLRLSCTASGFTFTDYYMSWVRQAPGKGLEWVGFIRSKADGYTTEYAASVKGRFTISRDDSKSIAYLQMNSLKTEDTAVYYCTRDAAYYSYYSPEGAMDYWGQGTLVTVSSGGGGSGGGGSGGGGSMADYKDIQMTQSPSSVSASVGDRVTITCRASQNVDSAVAWYQQKPGKAPKLLIYSASYRQSGVPSRFSGSGSGTDFTLTISSLQPEDFATYYCQQYYSTPWTFGQGTKVEIKREPKSPDKTHTCPPCPAPPVAGPSVFLFPPKPKDTLMIARTPEVTCVVVDVSHEDPEVKFNWYVDGVEVHNAKTKPREEQYNSTYRVVSVLTVLHQDWLNGKEYKCKVSNKALPAPIEKTISKAKGQPREPQVYTLPPSRDELTKNQVSLTCLVKGFYPSDIAVEWESNGQPENNYKTTPPVLDSDGSFFLYSKLTVDKSRWQQGNVFSCSVMHEALHNHYTQKSLSLSPGKIYIWAPLAGTCGVLLLSLVITLYC

SEQ ID NO: 7293 - protein, 531 aa, Artificial Sequence
  source: /note="Description of Artificial Sequence: Synthetic Chimeric Antigen Receptor"
MALPVTALLLPLALLLHAARPEVQLVESGGGLVQPGRSLRLSCTASGFTFTDYYMSWVRQAPGKGLEWVGFIRSKADGYTTEYAASVKGRFTISRDDSKSIAYLQMNSLKTEDTAVYYCTRDAAYYSYYSPEGAMDYWGQGTLVTVSSGGGGSGGGGSGGGGSMADYKDIQMTQSPSSVSASVGDRVTITCRASQNVDSAVAWYQQKPGKAPKLLIYSASYGQSGVPSRFSGSGSGTDFTLTISSLQPEDFATYYCQQYYSTPWTFGQGTKVEIKREPKSPDKTHTCPPCPAPPVAGPSVFLFPPKPKDTLMIARTPEVTCVVVDVSHEDPEVKFNWYVDGVEVHNAKTKPREEQYNSTYRVVSVLTVLHQDWLNGKEYKCKVSNKALPAPIEKTISKAKGQPREPQVYTLPPSRDELTKNQVSLTCLVKGFYPSDIAVEWESNGQPENNYKTTPPVLDSDGSFFLYSKLTVDKSRWQQGNVFSCSVMHEALHNHYTQKSLSLSPGKIYIWAPLAGTCGVLLLSLVITLYC

SEQ ID NO: 7294 - protein, 526 aa, Artificial Sequence
  source: /note="Description of Artificial Sequence: Synthetic Chimeric Antigen Receptor"
MALPVTALLLPLALLLHAARPEVKLVESGGGLVQPGGSLSLSCAASGFTFTDYYMSWVRQPPGKALEWLALIRSKADGYTTEYSASVKGRFTLSRDDSQSILYLQMNALRPEDSATYYCARDAAYYSYYSPEGAMDYWGQGTSVTVSSGGGGSGGGGSGGGGSMADYKDIVMTQSHKFMSTSVGDRVNITCKASQNVDSAVAWYQQKPGQSPKALIYSASYRYSGVPDRFTGRGSGTDFTLTISSVQAEDLAVYYCQQYYSTPWTFGGGTKLEIKRGSGGGGSCPYSNPSLCSGGGGSCPYSNPSLCSGGGGSAPTIASQPLSLRPEACRPAAGGAVHTRGLDFACDIYIWAPLAGTCGVLLLSLVITLYCRRGRKKLLYIFKQPFMRPVQTTQEEDGCSCRFPEEEEGGCELRVKFSRSADAPAYQQGQNQLYNELNLGRREEYDVLDKRRGRDPEMGGKPRRKNPQEGLYNELQKDKMAEAYSEIGMKGERRRGKGHDGLYQGLSTATKDTYDALHMQALPPRE

SEQ ID NO: 7295 - protein, 526 aa, Artificial Sequence; identical to SEQ ID NO: 7294
  source: /note="Description of Artificial Sequence: Synthetic Chimeric Antigen Receptor"

SEQ ID NO: 7296 - protein, 473 aa, Artificial Sequence
  source: /note="Description of Artificial Sequence: Synthetic Chimeric Antigen Receptor"
EVQLVESGGGLVQPGRSLRLSCTASGFTFTDYYMSWVRQAPGKGLEWVGLIRSKADGYTTEYAASVKGRFTISRDDSQSIAYLQMNSLKTEDTAVYYCARDAAYYSYYSPEGAMDYWGQGTLVTVSSGGGGSGGGGSGGGGSDIVMTQSPSSVSASVGDRVTITCRASQNVDSAVAWYQQKPGKAPKALIYSASYRYSGVPSRFSGRGSGTDFTLTISSLQPEDFATYYCQQYYSTPWTFGQGTKVEIKRTTTPAPRPPTPAPTIASQPLSLRPEACRPAAGGAVHTRGLDFACDIYIWAPLAGTCGVLLLSLVITLYCKRGRKKLLYIFKQPFMRPVQTTQEEDGCSCRFPEEEEGGCELRVKFSRSADAPAYQQGQNQLYNELNLGRREEYDVLDKRRGRDPEMGGKPRRKNPQEGLYNELQKDKMAEAYSEIGMKGERRRGKGHDGLYQGLSTATKDTYDALHMQALPPR

SEQ ID NO: 7297 - protein, 473 aa, Artificial Sequence
  source: /note="Description of Artificial Sequence: Synthetic Chimeric Antigen Receptor"
EVQLVESGGGLVQPGRSLRLSCTASGFTFTDYYMSWVRQAPGKGLEWVGLIRSKADGYTTEYSASVKGRFTISRDDSQSIAYLQMNSLKTEDTAVYYCARDAAYYSYYSPEGAMDYWGQGTLVTVSSGGGGSGGGGSGGGGSDIQMTQSPSSVSASVGDRVTITCKASQNVDSAVAWYQQKPGKAPKLLIYSASYRYSGVPSRFSGSGSGTDFTLTISSLQPEDFATYYCQQYYSTPWTFGQGTKVEIKRTTTPAPRPPTPAPTIASQPLSLRPEACRPAAGGAVHTRGLDFACDIYIWAPLAGTCGVLLLSLVITLYCKRGRKKLLYIFKQPFMRPVQTTQEEDGCSCRFPEEEEGGCELRVKFSRSADAPAYQQGQNQLYNELNLGRREEYDVLDKRRGRDPEMGGKPRRKNPQEGLYNELQKDKMAEAYSEIGMKGERRRGKGHDGLYQGLSTATKDTYDALHMQALPPR

SEQ ID NO: 7298 - protein, 470 aa, Artificial Sequence
  source: /note="Description of Artificial Sequence: Synthetic Chimeric Antigen Receptor"
EVQLVESGGGLVQPGRSLRLSCTASGFTFTDYYMSWVRQAPGKGLEWVGLIRSKADGYTTEYSASVKGRFTISRDDSQSIAYLQMNSLKTEDTAVYYCARDAAYYSYYSPEGAMDYGQGTLVTVSSGGGGSGGGGSGGGGSDIQMTQSPSSVSASVGDRVTITCRASQVDSAVAWYQQKPGKAPKALIYSASYRYSGVPSRFSGSGSGTDFTLTISSLQPEDLATYYCQQYYSTPTFGQGTKVEIKRTTTPAPRPPTPAPTIASQPLSLRPEACRPAAGGAVHTRGLDFACDIYIWAPLAGTCGVLLLSLVITLYCKRGRKKLLYIFKQPFMRPVQTTQEEDGCSCRFPEEEEGGCELRVKFSRSADAPAYQQGQNQLYNELNLGRREEYDVLDKRRGRDPEMGGKPRRKNPQEGLYNELQKDKMAEAYSEIGMKGERRRGKGHDGLYQGLSTATKDTYDALHMQALPPR

SEQ ID NO: 7299 - protein, 470 aa, Artificial Sequence
  source: /note="Description of Artificial Sequence: Synthetic Chimeric Antigen Receptor"
EVQLVESGGGLVQPGRSLRLSCTASGFTFTDYYMSVRQAPGKGLEWVGLIRSKADGYTTEYSASVKGRFTISRDDSKSILYLQMNSLKTEDTAVYYCARDAAYYSYYSPEGAMDYGQGTLVTVSSGGGGSGGGGSGGGGSDIQMTQSPSSVSASVGDRVTITCRASQNVDSAVAYQQKPGKAPKALIYSASYRYSGVPSRFSGSGSGTDFTLTISSLQPEDFATYYCQQYYSTPWTFGQGTKVEIKRTTTPAPRPPTPAPTIASQPLSLRPEACRPAAGGAVHTRGLDFACDIYIWAPLAGTCGVLLLSLVITLYCKRGRKKLLYIFKQPFMRPVQTTQEEDGCSCRFPEEEEGGCELRVKFSRSADAPAYQQGQNQLYNELNLGRREEYDVLDKRRGRDPEMGGKPRRKNPQEGLYNELQKDKMAEAYSEIGMKGERRRGKGHDGLYQGLSTATKDTYDALHMQALPPR

SEQ ID NO: 7300 - protein, 473 aa, Artificial Sequence
  source: /note="Description of Artificial Sequence: Synthetic Chimeric Antigen Receptor"
EVQLVESGGGLVQPGRSLRLSCTASGFTFTDYYMSWVRQAPGKGLEWVGLIRSKADGYTTEYSASVKGRFTISRDDSKSILYLQMNSLKTEDTAVYYCARDAAYYSYYSPEGAMDYWGQGTLVTVSSGGGGSGGGGSGGGGSDIQMTQSPSSVSASVGDRVTITCRASQNVDSAVAWYQQKPGKAPKALIYSASYRYSGVPSRFSGSGSGTDFTLTISSLQPEDFATYYCQQYYSTPWTFGQGTKVEIKRTTTPAPRPPTPAPTIASQPLSLRPEACRPAAGGAVHTRGLDFACDIYIWAPLAGTCGVLLLSLVITLYCKRGRKKLLYIFKQPFMRPVQTTQEEDGCSCRFPEEEEGGCELRVKFSRSADAPAYQQGQNQLYNELNLGRREEYDVLDKRRGRDPEMGGKPRRKNPQEGLYNELQKDKMAEAYSEIGMKGERRRGKGHDGLYQGLSTATKDTYDALHMQALPPR

SEQ ID NO: 7301 - protein, 471 aa, Artificial Sequence
  source: /note="Description of Artificial Sequence: Synthetic Chimeric Antigen Receptor"
EVQLVESGGGLVQPGRSLRLSCTASGFTFTDYYMSWVRQAPGKGLEWVGLIRSKADGYTTEYSASVKGRFTISRDDSQSIAYLQMNSLKTEDTAVYYCARDAAYYSYYSPEGAMDYGQGTLVTVSSGGGGSGGGGSGGGGSDIQMTQSPSSVSASVGDRVTITCRASQVDSAVAWYQQKPGKAPKALIYSASYRYSGVPSRFSGSGSGTDFTLTISSLQPEDFATYYCGQYYSTPWTFGQGTKVEIKRTTTPAPRPPTPAPTIASQPLSLRPEACRPAAGGAVHTRGLDFACDIYIWAPLAGTCGVLLLSLVITLYCKRGRKKLLYIFKQPFMRPVQTTQEEDGCSCRFPEEEEGGCELRVKFSRSADAPAYQQGQNQLYNELNLGRREEYDVLDKRRGRDPEMGGKPRRKNPQEGLYNELQKDKMAEAYSEIGMKGERRRGKGHDGLYQGLSTATKDTYDALHMQALPPR

SEQ ID NO: 7302 - protein, 473 aa, Artificial Sequence
  source: /note="Description of Artificial Sequence: Synthetic Chimeric Antigen Receptor"
EVQLVESGGGLVQPGRSLRLSCTASGFTFTDYYMSWVRQAPGKGLEWVGLIRSKADGYTTEYSASVKGRFTISRDDSKSILYLQMNSLKTEDTAVYYCARDAAYYSYYSPEGAMDYWGQGTLVTVSSGGGGSGGGGSGGGGSDIVMTQSPSSVSASVGDRVTITCRASQNVDSAVAWYQQKPGKAPKALIYSASYRYSGVPSRFSGRGSGTDFTLTISSLQPEDFATYYCQQYYSTPWTFGQGTKVEIKRTTTPAPRPPTPAPTIASQPLSLRPEACRPAAGGAVHTRGLDFACDIYIWAPLAGTCGVLLLSLVITLYCKRGRKKLLYIFKQPFMRPVQTTQEEDGCSCRFPEEEEGGCELRVKFSRSADAPAYQQGQNQLYNELNLGRREEYDVLDKRRGRDPEMGGKPRRKNPQEGLYNELQKDKMAEAYSEIGMKGERRRGKGHDGLYQGLSTATKDTYDALHMQALPPR

SEQ ID NO: 7303 - protein, 473 aa, Artificial Sequence; identical to SEQ ID NO: 7302
  source: /note="Description of Artificial Sequence: Synthetic Chimeric Antigen Receptor"

SEQ ID NO: 7304 - protein, 657 aa, Artificial Sequence
  source: /note="Description of Artificial Sequence: Synthetic Chimeric Antigen Receptor"
EVQLVESGGGLVQPGRSLRLSCTASGFTFTDYYMSWVRQAPGKGLEWVGLIRSKADGYTTEYSASVKGRFTISRDDSQSIAYLQMNSLKTEDTAVYYCARDAAYYSYYSPEGAMDYGQGTLVTVSSGGGGSGGGGSGGGGSDIQMTQSPSSVSASVGDRVTITCKASQVDSAVAWYQQKPGKAPKLLIYSASYRYSGVPSRFSGSGSGTDFTLTISSLQPEDFATYYCQQYYSTPWTFGQGTKVEIKREPKSPDKTHTCPPCPAPPVAGPSVFLFPPKPKDTLMIARTPEVTCVVVDVSHEDPEVKFNWYVDGVEVHNAKTKPREEQYNSTYRVVSVLTVLHQDWLNGKEYKCKVSNKALPAPIEKTISKAKGQPREPQVYTLPPSRDELTKNQVSLTCLVKGFYPSDIAVEWESNGQPENNYKTTPPVLDSDGSFFLYSKLTVDKSRWQQGNVFSCSVMHEALHNHYTQKSLSLSPGKIYIWAPLAGTCGVLLLSLVITLYCKRGRKKLLYIFKQPFMRPVQTTQEEDGCSCRFPEEEEGGCELRVKFSRSADAPAYQQGQNQLYNELNLGRREEYDVLDKRRGRDPEMGGKPRRKNPQEGLYNELQKDKMAEAYSEIGMKGERRRGKGHDGLYQGLSTATKDTYDALHMQALPPR

SEQ ID NO: 7305 - protein, 657 aa, Artificial Sequence
  source: /note="Description of Artificial Sequence: Synthetic Chimeric Antigen Receptor"
EVQLVESGGGLVQPGRSLRLSCTASGFTFTDYYMSWVRQAPGKGLEWVGLIRSKADGYTTEYAASVKGRFTISRDDSQSIAYLQMNSLKTEDTAVYYCARDAAYYSYYSPEGAMDYGQGTLVTVSSGGGGSGGGGSGGGGSDIQMTQSPSSVSASVGDRVTITCRASQVDSAVAWYQQKPGKAPKALIYSASYRYSGVPSRFSGSGSGTDFTLTISSLQPEDFATYYCQQYYSTPWTFGQGTKVEIKREPKSPDKTHTCPPCPAPPVAGPSVFLFPPKPKDTLMIARTPEVTCVVVDVSHEDPEVKFNWYVDGVEVHNAKTKPREEQYNSTYRVVSVLTVLHQDWLNGKEYKCKVSNKALPAPIEKTISKAKGQPREPQVYTLPPSRDELTKNQVSLTCLVKGFYPSDIAVEWESNGQPENNYKTTPPVLDSDGSFFLYSKLTVDKSRWQQGNVFSCSVMHEALHNHYTQKSLSLSPGKIYIWAPLAGTCGVLLLSLVITLYCKRGRKKLLYIFKQPFMRPVQTTQEEDGCSCRFPEEEEGGCELRVKFSRSADAPAYQQGQNQLYNELNLGRREEYDVLDKRRGRDPEMGGKPRRKNPQEGLYNELQKDKMAEAYSEIGMKGERRRGKGHDGLYQGLSTATKDTYDALHMQALPPR

SEQ ID NO: 7306 - protein, 659 aa, Artificial Sequence
  source: /note="Description of Artificial Sequence: Synthetic Chimeric Antigen Receptor"
EVQLVESGGGLVQPGRSLRLSCTASGFTFTDYYMSWVRQAPGKGLEWVGLIRSKADGYTTEYAASVKGRFTISRDDSQSIAYLQMNSLKTEDTAVYYCARDAAYYSYYSPEGAMDYWGQGTLVTVSSGGGGSGGGGSGGGGSDIQMTQSPSSVSASVGDRVTITCRASQNVDSAVAWYQQKPGKAPKALIYSASYRYSGVPSRFSGSGSGTDFTLTISSLQPEDFATYYCQQYYSTPWTFGQGTKVEIKREPKSPDKTHTCPPCPAPPVAGPSVFLFPPKPKDTLMIARTPEVTCVVVDVSHEDPEVKFNWYVDGVEVHNAKTKPREEQYNSTYRVVSVLTVLHQDWLNGKEYKCKVSNKALPAPIEKTISKAKGQPREPQVYTLPPSRDELTKNQVSLTCLVKGFYPSDIAVEWESNGQPENNYKTTPPVLDSDGSFFLYSKLTVDKSRWQQGNVFSCSVMHEALHNHYTQKSLSLSPGKIYIWAPLAGTCGVLLLSLVITLYCKRGRKKLLYIFKQPFMRPVQTTQEEDGCSCRFPEEEEGGCELRVKFSRSADAPAYQQGQNQLYNELNLGRREEYDVLDKRRGRDPEMGGKPRRKNPQEGLYNELQKDKMAEAYSEIGMKGERRRGKGHDGLYQGLSTATKDTYDALHMQALPPR

SEQ ID NO: 7307 - protein, 657 aa, Artificial Sequence
  source: /note="Description of Artificial Sequence: Synthetic Chimeric Antigen Receptor"
EVQLVESGGGLVQPGRSLRLSCTASGFTFTDYYMSWVRQAPGKGLEWVGLIRSKADGYTTEYSASVKGRFTISRDDSKSILYLQMNSLKTEDTAVYYCARDAAYYSYYSPEGAMDYGQGTLVTVSSGGGGSGGGGSGGGGSDIQMTQSPSSVSASVGDRVTITCRASQVDSAVAWYQQKPGKAPKALIYSASYRYSGVPSRFSGSGSGTDFTLTISSLQPEDFATYYCQQYYSTPWTFGQGTKVEIKREPKSPDKTHTCPPCPAPPVAGPSVFLFPPKPKDTLMIARTPEVTCVVVDVSHEDPEVKFNWYVDGVEVHNAKTKPREEQYNSTYRVVSVLTVLHQDWLNGKEYKCKVSNKALPAPIEKTISKAKGQPREPQVYTLPPSRDELTKNQVSLTCLVKGFYPSDIAVEWESNGQPENNYKTTPPVLDSDGSFFLYSKLTVDKSRWQQGNVFSCSVMHEALHNHYTQKSLSLSPGKIYIWAPLAGTCGVLLLSLVITLYCKRGRKKLLYIFKQPFMRPVQTTQEEDGCSCRFPEEEEGGCELRVKFSRSADAPAYQQGQNQLYNELNLGRREEYDVLDKRRGRDPEMGGKPRRKNPQEGLYNELQKDKMAEAYSEIGMKGERRRGKGHDGLYQGLSTATKDTYDALHMQALPPR

SEQ ID NO: 7308 - protein, 657 aa, Artificial Sequence
  source: /note="Description of Artificial Sequence: Synthetic Chimeric Antigen Receptor"
EVQLVESGGGLVQPGRSLRLSCTASGFTFTDYYMSWVRQAPGKGLEWVGLIRSKADGYTTEYAASVKGRFTISRDDSQSIAYLQMNSLKTEDTAVYYCARDAAYYSYYSPEGAMDYGQGTLVTVSSGGGGSGGGGSGGGGSDIQMTQSPSSVSASVGDRVTITCKASQVDSAVAWYQQKPGKAPKALIYSASYRYSGVPDRFSGSGSGTDFTLTISSLQPEDLATYYCQQYYSTPWTFGQGTKVEIKREPKSPDKTHTCPPCPAPPVAGPSVFLFPPKPKDTLMIARTPEVTCVVVDVSHEDPEVKFNWYVDGVEVHNAKTKPREEQYNSTYRVVSVLTVLHQDWLNGKEYKCKVSNKALPAPIEKTISKAKGQPREPQVYTLPPSRDELTKNQVSLTCLVKGFYPSDIAVEWESNGQPENNYKTTPPVLDSDGSFFLYSKLTVDKSRWQQGNVFSCSVMHEALHNHYTQKSLSLSPGKIYIWAPLAGTCGVLLLSLVITLYCKRGRKKLLYIFKQPFMRPVQTTQEEDGCSCRFPEEEEGGCELRVKFSRSADAPAYQQGQNQLYNELNLGRREEYDVLDKRRGRDPEMGGKPRRKNPQEGLYNELQKDKMAEAYSEIGMKGERRRGKGHDGLYQGLSTATKDTYDALHMQALPPR

SEQ ID NO: 7309 - protein, 659 aa, Artificial Sequence
  source: /note="Description of Artificial Sequence: Synthetic Chimeric Antigen Receptor"
EVQLVESGGGLVQPGRSLRLSCTASGFTFTDYYMSWVRQAPGKGLEWVGLIRSKADGYTTEYAASVKGRFTISRDDSQSIAYLQMNSLKTEDTAVYYCARDAAYYSYYSPEGAMDYWGQGTLVTVSSGGGGSGGGGSGGGGSDIQMTQSPSSVSASVGDRVTITCKASQNVDSAVAWYQQKPGKAPKALIYSASYRYSGVPDRFSGSGSGTDFTLTISSLQPEDLATYYCQQYYSTPWTFGQGTKVEIKREPKSPDKTHTCPPCPAPPVAGPSVFLFPPKPKDTLMIARTPEVTCVVVDVSHEDPEVKFNWYVDGVEVHNAKTKPREEQYNSTYRVVSVLTVLHQDWLNGKEYKCKVSNKALPAPIEKTISKAKGQPREPQVYTLPPSRDELTKNQVSLTCLVKGFYPSDIAVEWESNGQPENNYKTTPPVLDSDGSFFLYSKLTVDKSRWQQGNVFSCSVMHEALHNHYTQKSLSLSPGKIYIWAPLAGTCGVLLLSLVITLYCKRGRKKLLYIFKQPFMRPVQTTQEEDGCSCRFPEEEEGGCELRVKFSRSADAPAYQQGQNQLYNELNLGRREEYDVLDKRRGRDPEMGGKPRRKNPQEGLYNELQKDKMAEAYSEIGMKGERRRGKGHDGLYQGLSTATKDTYDALHMQALPPR

SEQ ID NO: 7310 - protein, 657 aa, Artificial Sequence
  source: /note="Description of Artificial Sequence: Synthetic Chimeric Antigen Receptor"
EVQLVESGGGLVQPGRSLRLSCTASGFTFTDYYMSWVRQAPGKGLEWVGLIRSKADGYTTEYSASVKGRFTISRDDSKSILYLQMNSLKTEDTAVYYCARDAAYYSYYSPEGAMDYWGQGTLVTVSSGGGGSGGGGSGGGGSDIVMTQSPSSVSASVGDRVTITCRASQNVDSAVAWYQQKPGKAPKALIYSASYRYSGVPSRFSGRGSGTDFTLTISSLQPEDFATYYCQQYYSTPWTFGQGTKVEIKREPKSPDKTHTCPPCPAPPVAGPSVFLFPPKPKDTLMIARTPEVTCWVDVSHEDPEVKFNWYVDGVEVHNAKTKPREEQYNSTYRWSVLTVLHQDWLNGKEYKCKVSNKALPAPIEKTISKAKGQPREPQVYTLPPSRDELTKNQVSLTCLVKGFYPSDIAVEWESNGQPENNYKTTPPVLDSDGSFFLYSKLTVDKSRWQQGNVFSCSVMHEALHNHYTQKSLSLSPGKIYIWAPLAGTCGVLLLSLVITLYCKRGRKKLLYIFKQPFMRPVQTTQEEDGCSCRFPEEEEGGCELRVKFSRSADAPAYQQGQNQLYNELNLGRREEYDVLDKRRGRDPEMGGKPRRKNPQEGLYNELQKDKMAEAYSEIGMKGERRRGKGHDGLYQGLSTATKDTYDALHMQALPPR

SEQ ID NO: 7311 - protein, 511 aa, Artificial Sequence
  source: /note="Description of Artificial Sequence: Synthetic Chimeric Antigen Receptor"
MALPVTALLLPLALLLHAARPQIQLVQSGPELKKPGETVKISCKASGYIFTNYGMNWVKQAPGKSFKWMGWINTYTGESTYSADFKGRFAFSLETSASTAYLHINDLKNEDTATYFCARSGGYDPMDYWGQGTSVTVSSGGGGSGGGGSGGGGSDIVLTQSPASLAVSLGQRATISCRASESVDNYGNTFMHWYQQKPGQPPKLLIYRASNLESGIPARFSGSGSRTDFTLTINPVEADDVATYYCQQSNEDPPTFGAGTKLELKRSDPGSGGGGSCPYSNPSLCAPTTTPAPRPPTPAPTIASQPLSLRPEACRPAAGGAVHTRGLDFACDIYIWAPLAGTCGVLLLSLVITLYCRRGRKKLLYIFKQPFMRPVQTTQEEDGCSCRFPEEEEGGCELRVKFSRSADAPAYQQGQNQLYNELNLGRREEYDVLDKRRGRDPEMGGKPRRKNPQEGLYNELQKDKMAEAYSEIGMKGERRRGKGHDGLYQGLSTATKDTYDALHMQALPPRE

SEQ ID NO: 7312 - protein, 517 aa, Artificial Sequence
  source: /note="Description of Artificial Sequence: Synthetic Chimeric Antigen Receptor"
MALPVTALLLPLALLLHAARPQIQLVQSGPELKKPGETVKISCKASGYIFTNYGMNWVKQAPGKSFKWMGWINTYTGESTYSADFKGRFAFSLETSASTAYLHINDLKNEDTATYFCARSGGYDPMDYWGQGTSVTVSSGGGGSGGGGSGGGGSDIVLTQSPASLAVSLGQRATISCRASESVDNYGNTFMHWYQQKPGQPPKLLIYRASNLESGIPARFSGSGSRTDFTLTINPVEADDVATYYCQQSNEDPPTFGAGTKLELKRSDPGSGGGGSCPYSNPSLCSGGGGSAPTTTPAPRPPTPAPTIASQPLSLRPEACRPAAGGAVHTRGLDFACDIYIWAPLAGTCGVLLLSLVITLYCRRGRKKLLYIFKQPFMRPVQTTQEEDGCSCRFPEEEEGGCELRVKFSRSADAPAYQQGQNQLYNELNLGRREEYDVLDKRRGRDPEMGGKPRRKNPQEGLYNELQKDKMAEAYSEIGMKGERRRGKGHDGLYQGLSTATKDTYDALHMQALPPRE

SEQ ID NO: 7313 - protein, 526 aa, Artificial Sequence
  source: /note="Description of Artificial Sequence: Synthetic Chimeric Antigen Receptor"
MALPVTALLLPLALLLHAARPQIQLVQSGPELKKPGETVKISCKASGYIFTNYGMNWVKQAPGKSFKWMGWINTYTGESTYSADFKGRFAFSLETSASTAYLHINDLKNEDTATYFCARSGGYDPMDYWGQGTSVTVSSGGGGSGGGGSGGGGSDIVLTQSPASLAVSLGQRATISCRASESVDNYGNTFMHWYQQKPGQPPKLLIYRASNLESGIPARFSGSGSRTDFTLTINPVEADDVATYYCQQSNEDPPTFGAGTKLELKRSDPGSGGGGSCPYSNPSLCSGGGGSCPYSNPSLCAPTTTPAPRPPTPAPTIASQPLSLRPEACRPAAGGAVHTRGLDFACDIYIWAPLAGTCGVLLLSLVITLYCRRGRKKLLYIFKQPFMRPVQTTQEEDGCSCRFPEEEEGGCELRVKFSRSADAPAYQQGQNQLYNELNLGRREEYDVLDKRRGRDPEMGGKPRRKNPQEGLYNELQKDKMAEAYSEIGMKGERRRGKGHDGLYQGLSTATKDTYDALHMQALPPRE

SEQ ID NO: 7314 - protein, 532 aa, Artificial Sequence
  source: /note="Description of Artificial Sequence: Synthetic Chimeric Antigen Receptor"
MALPVTALLLPLALLLHAARPQIQLVQSGPELKKPGETVKISCKASGYIFTNYGMNWVKQAPGKSFKWMGWINTYTGESTYSADFKGRFAFSLETSASTAYLHINDLKNEDTATYFCARSGGYDPMDYWGQGTSVTVSSGGGGSGGGGSGGGGSDIVLTQSPASLAVSLGQRATISCRASESVDNYGNTFMHWYQQKPGQPPKLLIYRASNLESGIPARFSGSGSRTDFTLTINPVEADDVATYYCQQSNEDPPTFGAGTKLELKRSDPGSGGGGSCPYSNPSLCSGGGGSCPYSNPSLCSGGGGSAPTTTPAPRPPTPAPTIASQPLSLRPEACRPAAGGAVHTRGLDFACDIYIWAPLAGTCGVLLLSLVITLYCRRGRKKLLYIFKQPFMRPVQTTQEEDGCSCRFPEEEEGGCELRVKFSRSADAPAYQQGQNQLYNELNLGRREEYDVLDKRRGRDPEMGGKPRRKNPQEGLYNELQKDKMAEAYSEIGMKGERRRGKGHDGLYQGLSTATKDTYDALHMQALPPRE

SEQ ID NO: 7315 - protein, 495 aa, Artificial Sequence
  source: /note="Description of Artificial Sequence: Synthetic Chimeric Antigen Receptor"
MALPVTALLLPLALLLHAARPQIQLVQSGPELKKPGETVKISCKASGYIFTNYGMNWVKQAPGKSFKWMGWINTYTGESTYSADFKGRFAFSLETSASTAYLHINDLKNEDTATYFCARSGGYDPMDYWGQGTSVTVSSGGGCPYSNPSLCGGGGSDIVLTQSPASLAVSLGQRATISCRASESVDNYGNTFMHWYQQKPGQPPKLLIYRASNLESGIPARFSGSGSRTDFTLTINPVEADDVATYYCQQSNEDPPTFGAGTKLELKRSDPTTTPAPRPPTPAPTIASQPLSLRPEACRPAAGGAVHTRGLDFACDIYIWAPLAGTCGVLLLSLVITLYCRRGRKKLLYIFKQPFMRPVQTTQEEDGCSCRFPEEEEGGCELRVKFSRSADAPAYQQGQNQLYNELNLGRREEYDVLDKRRGRDPEMGGKPRRKNPQEGLYNELQKDKMAEAYSEIGMKGERRRGKGHDGLYQGLSTATKDTYDALHMQALPPRE

SEQ ID NO: 7316 - protein, 501 aa, Artificial Sequence
  source: /note="Description of Artificial Sequence: Synthetic Chimeric Antigen Receptor"
MALPVTALLLPLALLLHAARPQIQLVQSGPELKKPGETVKISCKASGYIFTNYGMNWVKQAPGKSFKWMGWINTYTGESTYSADFKGRFAFSLETSASTAYLHINDLKNEDTATYFCARSGGYDPMDYWGQGTSVTVSSGGGGGGCPYSNPSLCGGGGGGGSDIVLTQSPASLAVSLGQRATISCRASESVDNYGNTFMHWYQQKPGQPPKLLIYRASNLESGIPARFSGSGSRTDFTLTINPVEADDVATYYCQQSNEDPPTFGAGTKLELKRSDPTTTPAPRPPTPAPTIASQPLSLRPEACRPAAGGAVHTRGLDFACDIYIWAPLAGTCGVLLLSLVITLYCRRGRKKLLYIFKQPFMRPVQTTQEEDGCSCRFPEEEEGGCELRVKFSRSADAPAYQQGQNQLYNELNLGRREEYDVLDKRRGRDPEMGGKPRRKNPQEGLYNELQKDKMAEAYSEIGMKGERRRGKGHDGLYQGLSTATKDTYDALHMQALPPRE

SEQ ID NO: 7317 - protein, 508 aa, Artificial Sequence
  source: /note="Description of Artificial Sequence: Synthetic Chimeric Antigen Receptor"
MALPVTALLLPLALLLHAARPGGGGSCPYSNPSLCGQIQLVQSGPELKKPGETVKISCKASGYIFTNYGMNWVKQAPGKSFKWMGWINTYTGESTYSADFKGRFAFSLETSASTAYLHINDLKNEDTATYFCARSGGYDPMDYWGQGTSVTVSSGGGGSGGGGSGGGGSDIVLTQSPASLAVSLGQRATISCRASESVDNYGNTFMHWYQQKPGQPPKLLIYRASNLESGIPARFSGSGSRTDFTLTINPVEADDVATYYCQQSNEDPPTFGAGTKLELKRSDPTTTPAPRPPTPAPTIASQPLSLRPEACRPAAGGAVHTRGLDFACDIYIWAPLAGTCGVLLLSLVITLYCRRGRKKLLYIFKQPFMRPVQTTQEEDGCSCRFPEEEEGGCELRVKFSRSADAPAYQQGQNQLYNELNLGRREEYDVLDKRRGRDPEMGGKPRRKNPQEGLYNELQKDKMAEAYSEIGMKGERRRGKGHDGLYQGLSTATKDTYDALHMQALPPRE

SEQ ID NO: 7318 - protein, 514 aa, Artificial Sequence
  source: /note="Description of Artificial Sequence: Synthetic Chimeric Antigen Receptor"
MALPVTALLLPLALLLHAARPGGGGSCPYSNPSLCSGGGGSGQIQLVQSGPELKKPGETVKISCKASGYIFTNYGMNWVKQAPGKSFKWMGWINTYTGESTYSADFKGRFAFSLETSASTAYLHINDLKNEDTATYFCARSGGYDPMDYWGQGTSVTVSSGGGGSGGGGSGGGGSDIVLTQSPASLAVSLGQRATISCRASESVDNYGNTFMHWYQQKPGQPPKLLIYRASNLESGIPARFSGSGSRTDFTLTINPVEADDVATYYCQQSNEDPPTFGAGTKLELKRSDPTTTPAPRPPTPAPTIASQPLSLRPEACRPAAGGAVHTRGLDFACDIYIWAPLAGTCGVLLLSLVITLYCRRGRKKLLYIFKQPFMRPVQTTQEEDGCSCRFPEEEEGGCELRVKFSRSADAPAYQQGQNQLYNELNLGRREEYDVLDKRRGRDPEMGGKPRRKNPQEGLYNELQKDKMAEAYSEIGMKGERRRGKGHDGLYQGLSTATKDTYDALHMQALPPRE

SEQ ID NO: 7319 - protein, 523 aa, Artificial Sequence
  source: /note="Description of Artificial Sequence: Synthetic Chimeric Antigen Receptor"
MALPVTALLLPLALLLHAARPGGGGSCPYSNPSLCSGGGGSCPYSNPSLCGQIQLVQSGPELKKPGETVKISCKASGYIFTNYGMNWVKQAPGKSFKWMGWINTYTGESTYSADFKGRFAFSLETSASTAYLHINDLKNEDTATYFCARSGGYDPMDYWGQGTSVTVSSGGGGSGGGGSGGGGSDIVLTQSPASLAVSLGQRATISCRASESVDNYGNTFMHWYQQKPGQPPKLLIYRASNLESGIPARFSGSGSRTDFTLTINPVEADDVATYYCQQSNEDPPTFGAGTKLELKRSDPTTTPAPRPPTPAPTIASQPLSLRPEACRPAAGGAVHTRGLDFACDIYIWAPLAGTCGVLLLSLVITLYCRRGRKKLLYIFKQPFMRPVQTTQEEDGCSCRFPEEEEGGCELRVKFSRSADAPAYQQGQNQLYNELNLGRREEYDVLDKRRGRDPEMGGKPRRKNPQEGLYNELQKDKMAEAYSEIGMKGERRRGKGHDGLYQGLSTATKDTYDALHMQALPPRE

SEQ ID NO: 7320 - protein, 529 aa, Artificial Sequence
  source: /note="Description of Artificial Sequence: Synthetic Chimeric Antigen Receptor"
MALPVTALLLPLALLLHAARPGGGGSCPYSNPSLCSGGGGSCPYSNPSLCSGGGGSGQIQLVQSGPELKKPGETVKISCKASGYIFTNYGMNWVKQAPGKSFKWMGWINTYTGESTYSADFKGRFAFSLETSASTAYLHINDLKNEDTATYFCARSGGYDPMDYWGQGTSVTVSSGGGGSGGGGSGGGGSDIVLTQSPASLAVSLGQRATISCRASESVDNYGNTFMHWYQQKPGQPPKLLIYRASNLESGIPARFSGSGSRTDFTLTINPVEADDVATYYCQQSNEDPPTFGAGTKLELKRSDPTTTPAPRPPTPAPTIASQPLSLRPEACRPAAGGAVHTRGLDFACDIYIWAPLAGTCGVLLLSLVITLYCRRGRKKLLYIFKQPFMRPVQTTQEEDGCSCRFPEEEEGGCELRVKFSRSADAPAYQQGQNQLYNELNLGRREEYDVLDKRRGRDPEMGGKPRRKNPQEGLYNELQKDKMAEAYSEIGMKGERRRGKGHDGLYQGLSTATKDTYDALHMQALPPRE

SEQ ID NO: 7321 - protein, 511 aa, Artificial Sequence; identical to SEQ ID NO: 7311
  source: /note="Description of Artificial Sequence: Synthetic Chimeric Antigen Receptor"

SEQ ID NO: 7322 - protein, 517 aa, Artificial Sequence; identical to SEQ ID NO: 7312
  source: /note="Description of Artificial Sequence: Synthetic Chimeric Antigen Receptor"

SEQ ID NO: 7323 - protein, 526 aa, Artificial Sequence; identical to SEQ ID NO: 7313
  source: /note="Description of Artificial Sequence: Synthetic Chimeric Antigen Receptor"

SEQ ID NO: 7324 - protein, 532 aa, Artificial Sequence; identical to SEQ ID NO: 7314
  source: /note="Description of Artificial Sequence: Synthetic Chimeric Antigen Receptor"

SEQ ID NO: 7325 - protein, 495 aa, Artificial Sequence; identical to SEQ ID NO: 7315
  source: /note="Description of Artificial Sequence: Synthetic Chimeric Antigen Receptor"

SEQ ID NO: 7326 - protein, 501 aa, Artificial Sequence; identical to SEQ ID NO: 7316
  source: /note="Description of Artificial Sequence: Synthetic Chimeric Antigen Receptor"

SEQ ID NO: 7327 - protein, 508 aa, Artificial Sequence; identical to SEQ ID NO: 7317
  source: /note="Description of Artificial Sequence: Synthetic Chimeric Antigen Receptor"

SEQ ID NO: 7328 - protein, 514 aa, Artificial Sequence; identical to SEQ ID NO: 7318
  source: /note="Description of Artificial Sequence: Synthetic Chimeric Antigen Receptor"

SEQ ID NO: 7329 - protein, 523 aa, Artificial Sequence; identical to SEQ ID NO: 7319
  source: /note="Description of Artificial Sequence: Synthetic Chimeric Antigen Receptor"

SEQ ID NO: 7330 - protein, 529 aa, Artificial Sequence; identical to SEQ ID NO: 7320
  source: /note="Description of Artificial Sequence: Synthetic Chimeric Antigen Receptor"

SEQ ID NO: 7331 - protein, 467 aa, Artificial Sequence; identical to SEQ ID NO: 7108
  source: /note="Description of Artificial Sequence: Synthetic Chimeric Antigen Receptor"

SEQ ID NO: 7332 - protein, 486 aa, Artificial Sequence
  source: /note="Description of Artificial Sequence: Synthetic Chimeric Antigen Receptor"
MALPVTALLLPLALLLHAARPEIVMTQSPATLSLSPGERATLSCRASQDISKYLNWYQQKPGQAPRLLIYHTSRLHSGIPARFSGSGSGTDYTLTISSLQPEDFAVYFCQQGNTLPYTFGQGTKLEIKGGGGSGGGGSGGGGSQVQLQESGPGLVKPSETLSLTCTVSGVSLPDYGVSWIRQPPGKGLEWIGVIWGSETTYYSSSLKSRVTISKDNSKNQVSLKLSSVTAADTAVYYCAKHYYYGGSYAMDYWGQGTLVTVSSTTTPAPRPPTPAPTIASQPLSLRPEACRPAAGGAVHTRGLDFACDIYIWAPLAGTCGVLLLSLVITLYCKRGRKKLLYIFKQPFMRPVQTTQEEDGCSCRFPEEEEGGCELRVKFSRSADAPAYKQGQNQLYNELNLGRREEYDVLDKRRGRDPEMGGKPRRKNPQEGLYNELQKDKMAEAYSEIGMKGERRRGKGHDGLYQGLSTATKDTYDALHMQALPPR

SEQ ID NO: 7333 - protein, 486 aa, Artificial Sequence
  source: /note="Description of Artificial Sequence: Synthetic Chimeric Antigen Receptor"
MALPVTALLLPLALLLHAARPDIQMTQTTSSLSASLGDRVTISCRASQDISKYLNWYQQKPDGTVKLLIYHTSRLHSGVPSRFSGSGSGTDYSLTISNLEQEDIATYFCQQGNTLPYTFGGGTKLEITGGGGSGGGGSGGGGSEVKLQESGPGLVAPSQSLSVTCTVSGVSLPDYGVSWIRQPPRKGLEWLGVIWGSETTYYNSALKSRLTIIKDNSKSQVFLKMNSLQTDDTAIYYCAKHYYYGGSYAMDYWGQGTSVTVSSTTTPAPRPPTPAPTIASQPLSLRPEACRPAAGGAVHTRGLDFACDIYIWAPLAGTCGVLLLSLVITLYCKRGRKKLLYIFKQPFMRPVQTTQEEDGCSCRFPEEEEGGCELRVKFSRSADAPAYKQGQNQLYNELNLGRREEYDVLDKRRGRDPEMGGKPRRKNPQEGLYNELQKDKMAEAYSEIGMKGERRRGKGHDGLYQGLSTATKDTYDALHMQALPPR

SEQ ID NO: 7334 - protein, 680 aa, Artificial Sequence
  source: /note="Description of Artificial Sequence: Synthetic Chimeric Antigen Receptor"
MLLLVTSLLLCELPHPAFLLIPDIQMTQTTSSLSASLGDRVTISCRASQDISKYLNWYQQKPDGTVKLLIYHTSRLHSGVPSRFSGSGSGTDYSLTISNLEQEDIATYFCQQGNTLPYTFGGGTKLEITGSTSGSGKPGSGEGSTKGEVKLQESGPGLVAPSQSLSVTCTVSGVSLPDYGVSWIRQPPRKGLEWLGVIWGSETTYYNSALKSRLTIIKDNSKSQVFLKMNSLQTDDTAIYYCAKHYYYGGSYAMDYWGQGTSVTVSSESKYGPPCPPCPAPEFEGGPSVFLFPPKPKDTLMISRTPEVTCVVVDVSQEDPEVQFNWYVDGVEVHNAKTKPREEQFNSTYRVVSVLTVLHQDWLNGKEYKCKVSNKGLPSSIEKTISKAKGQPREPQVYTLPPSQEEMTKNQVSLTCLVKGFYPSDIAVEWESNGQPENNYKTTPPVLDSDGSFFLYSRLTVDKSRWQEGNVFSCSVMHEALHNHYTQKSLSLSLGKMFWVLVVVGGVLACYSLLVTVAFIIFWVRSKRSRGGHSDYMNMTPRRPGPTRKHYQPYAPPRDFAAYRSGGGRVKFSRSADAPAYQQGQNQLYNELNLGRREEYDVLDKRRGRDPEMGGKPRRKNPQEGLYNELQKDKMAEAYSEIGMKGERRRGKGHDGLYQGLSTATKDTYDALHMQALPPR

SEQ ID NO: 7335 - protein, 680 aa, Artificial Sequence
  source: /note="Description of Artificial Sequence: Synthetic Chimeric Antigen Receptor"
MLLLVTSLLLCELPHPAFLLIPDIQMTQTTSSLSASLGDRVTISCRASQDISKYLNWYQQKPDGTVKLLIYHTSRLHSGVPSRFSGSGSGTDYSLTISNLEQEDIATYFCQQGNTLPYTFGGGTKLEITGSTSGSGKPGSGEGSTKGEVKLQESGPGLVAPSQSLSVTCTVSGVSLPDYGVSWIRQPPRKGLEWLGVIWGSETTYYNSALKSRLTIIKDNSKSQVFLKMNSLQTDDTAIYYCAKHYYYGGSYAMDYWGQGTSVTVSSESKYGPPCPPCPAPEFLGGPSVFLFPPKPKDTLMISRTPEVTCVVVDVSQEDPEVQFNWYVDGVEVHNAKTKPREEQFQSTYRVVSVLTVLHQDWLNGKEYKCKVSNKGLPSSIEKTISKAKGQPREPQVYTLPPSQEEMTKNQVSLTCLVKGFYPSDIAVEWESNGQPENNYKTTPPVLDSDGSFFLYSRLTVDKSRWQEGNVFSCSVMHEALHNHYTQKSLSLSLGKMFWVLVVVGGVLACYSLLVTVAFIIFWVRSKRSRGGHSDYMNMTPRRPGPTRKHYQPYAPPRDFAAYRSGGGRVKFSRSADAPAYQQGQNQLYNELNLGRREEYDVLDKRRGRDPEMGGKPRRKNPQEGLYNELQKDKMAEAYSEIGMKGERRRGKGHDGLYQGLSTATKDTYDALHMQALPPR

SEQ ID NO: 7336 - protein, 680 aa, Artificial Sequence
  source: /note="Description of Artificial Sequence: Synthetic Chimeric Antigen Receptor"
MLLLVTSLLLCELPHPAFLLIPDIQMTQTTSSLSASLGDRVTISCRASQDISKYLNWYQQKPDGTVKLLIYHTSRLHSGVPSRFSGSGSGTDYSLTISNLEQEDIATYFCQQGNTLPYTFGGGTKLEITGSTSGSGKPGSGEGSTKGEVKLQESGPGLVAPSQSLSVTCTVSGVSLPDYGVSWIRQPPRKGLEWLGVIWGSETTYYNSALKSRLTIIKDNSKSQVFLKMNSLQTDDTAIYYCAKHYYYGGSYAMDYWGQGTSVTVSSESKYGPPCPPCPAPEFEGGPSVFLFPPKPKDTLMISRTPEVTCVVVDVSQEDPEVQFNWYVDGVEVHNAKTKPREEQFQSTYRVVSVLTVLHQDWLNGKEYKCKVSNKGLPSSIEKTISKAKGQPREPQVYTLPPSQEEMTKNQVSLTCLVKGFYPSDIAVEWESNGQPENNYKTTPPVLDSDGSFFLYSRLTVDKSRWQEGNVFSCSVMHEALHNHYTQKSLSLSLGKMFWVLVVVGGVLACYSLLVTVAFIIFWVRSKRSRGGHSDYMNMTPRRPGPTRKHYQPYAPPRDFAAYRSGGGRVKFSRSADAPAYQQGQNQLYNELNLGRREEYDVLDKRRGRDPEMGGKPRRKNPQEGLYNELQKDKMAEAYSEIGMKGERRRGKGHDGLYQGLSTATKDTYDALHMQALPPR

SEQ ID NO: 7337 - protein, 580 aa, Artificial Sequence
  source: /note="Description of Artificial Sequence: Synthetic Chimeric Antigen Receptor"
MLLLVTSLLLCELPHPAFLLIPDIQMTQTTSSLSASLGDRVTISCRASQDISKYLNWYQQKPDGTVKLLIYHTSRLHSGVPSRFSGSGSGTDYSLTISNLEQEDIATYFCQQGNTLPYTFGGGTKLEITGSTSGSGKPGSGEGSTKGEVKLQESGPGLVAPSQSLSVTCTVSGVSLPDYGVSWIRQPPRKGLEWLGVIWGSETTYYNSALKSRLTIIKDNSKSQVFLKMNSLQTDDTAIYYCAKHYYYGGSYAMDYWGQGTSVTVSSESKYGPPCPPCPGGGSSGGGSGGQPREPQVYTLPPSQEEMTKNQVSLTCLVKGFYPSDIAVEWESNGQPENNYKTTPPVLDSDGSFFLYSRLTVDKSRWQEGNVFSCSVMHEALHNHYTQKSLSLSLGKMFWVLVVVGGVLACYSLLVTVAFIIFWVRSKRSRGGHSDYMNMTPRRPGPTRKHYQPYAPPRDFAAYRSGGGRVKFSRSADAPAYQQGQNQLYNELNLGRREEYDVLDKRRGRDPEMGGKPRRKNPQEGLYNELQKDKMAEAYSEIGMKGERRRGKGHDGLYQGLSTATKDTYDALHMQALPPR

SEQ ID NO: 7338 - protein, 711 aa, Artificial Sequence
  source: /note="Description of Artificial Sequence: Synthetic Chimeric Antigen Receptor"
MLLLVTSLLLLCELPHPAFLLIPDIQMTQQTTSSLSASLGDRVTISCRASSQDISKYLNWYQQKPDGTVKLLLIYHTSRLHSGVPSRFSGSGGSGTDYSLTISNLEQEDIATYYFCQQGNTLPYTFGGGTKLEIITGSTSGSGKPGSGEGSTKGEEVKLQESGPGLVAPSQSLSVTTCTVSGVSLPDYGVSWIRQPPPRKGLEWLGVIWGSETTYYNSSALKSRLTIIKDNSKSQVFLKKMNSLQTDDTAIYYCAKHYYYYGGSYAMDYWGQGTSVTVSSEESKYGPPCPPCPAPEFLGGPSSVFLFPPKPKDTLMISRTPEVVTCVVVDVSQEDPEVQFNWYVVDGVEVHNAKTKPREEQFNSTTYRVVSVLTVLHQDWLNGKEYYKCKVSNKGLPSSIEKTISKAAKGQPREPQVYTLPPSQEEMTTKNQVSLTCLVKGFYPSDIAVVEWESNGQPENNYKTTPPVLDDSDGSFFLYSRLTVDKSRWQEEGNVFSCSVMHEALHNHYTQKKSLSLSLGKMFWVLVVVGGVLLACYSLLVTVAFIIFWVRSKRRSRGGHSDYMNMTPRRPGPTRRKHYQPYAPPRDFAAYRSRVKKFSRSADAPAYQQGQNQLYNEELNLGRREEYDVLDKRRGRDPPEMGGKPRRKNPQEGLYNELQQKDKMAEAYSEIGMKGERRRGGKGHDGLYQGLSTATKDTYDAALHMQALPPR

SEQ ID NO: 7339 - protein, 495 aa, Artificial Sequence
  source: /note="Description of Artificial Sequence: Synthetic Chimeric Antigen Receptor"
MALPVTALLLPLALLLHAARPEVQLQQSGPELIKPGASVKMSCKASGYTFTSYVMHWVKQKPGQGLEWIGYINPYNDGTKYNEKFKGKATLTSDKSSSTAYMELSSLTSEDSAVYYCARGTYYYGSRVFDYWGQGTTLTVSSGGGGSGGGGSGGGGSDIVMTQAAPSIPVTPGESVSISCRSSKSLLNSNGNTYLYWFLQRPGQSPQLLIYRMSNLASGVPDRFSGSGSGTAFTLRISRVEAEDVGVYYCMQHLEYPFTFGAGTKLELKRADTTTPAPRPPTPAPTIASQPLSLRPEACRPAAGGAVHTRGLDFACDIYIWAPLAGTCGVLLLSLVITLYCKRGRKKLLYIFKQPFMRPVQTTQEEDGCSCRFPEEEEGGCELRVKFSRSADAPAYQQGQNQLYNELNLGRREEYDVLDKRRGRDPEMGGKPRRKNPQEGLYNELQKDKMAEAYSEIGMKGERRRGKGHDGLYQGLSTATKDTYDALHMQALPPR

SEQ ID NO: 7340 - protein, 495 aa, Artificial Sequence; identical to SEQ ID NO: 5754
  source: /note="Description of Artificial Sequence: Synthetic Chimeric Antigen Receptor"

SEQ ID NO: 7341 - protein, 484 aa, Artificial Sequence
  source: /note="Description of Artificial Sequence: Synthetic Chimeric Antigen Receptor"
MALPVTALLLPLALLLHAARPDIQMTQTTSSLSASLGDRVTISCRASQDISKYLNWYQQKPDGTVKLLIYHTSRLHSGVPSRFSGSGSGTDYSLTISNLEQEDIATYFCQQGNTLPYTFGGGTKLEITGGGGSGGGGSGGGGSEVKLQESGPGLVAPSQSLSVTCTVSGVSLPDYGVSWIRQPPRKGLEWLGVIWGSETTYYNSALKSRLTIIKDNSKSQVFLKMNSLQTDDTAIYYCAKHYYYGGSYAMDYWGQGTSVTVSSTTTPAPRPPTPAPTIASQPLSLRPEACRPAAGGAVHTRGLDFACDMWAPLAGTCGVLLLSLVITLYCKRGRKKLLYIFKQPFMRPVQTTQEEDGCSCRFPEEEEGGCELRVKFSRSADAPAYKQGQNQLYNELNLGRREEYDVLDKRRGRDPEMGGKPRRKNPQEGLYNELQKDKMAEAYSEIGMKGERRRGKGHDGLYQGLSTATKDTYDALHMQALPPR

SEQ ID NO: 7342 - protein, 476 aa, Artificial Sequence
  source: /note="Description of Artificial Sequence: Synthetic Chimeric Antigen Receptor"
MLLLVTSLLLCELPHPAFLLIPDIQMTQTTSSLSASLGDRVTISCRASQDISKYLNWYQQKPDGTVKLLIYHTSRLHSGVPSRFSGSGSGTDYSLTISNLEQEDIATYFCQQGNTLPYTFGGGTKLEITGSTSGSGKPGSGEGSTKGEVKLQESGPGLVAPSQSLSVTCTVSGVSLPDYGVSWIRQPPRKGLEWLGVIWGSETTYYNSALKSRLTIIKDNSKSQVFLKMNSLQTDDTAIYYCAKHYYYGGSYAMDYWGQGTSVTVSSESKYGPPCPPCPMFWVLVVVGGVLACYSLLVTVAFIIFWVKRGRKKLLYIFKQPFMRPVQTTQEEDGCSCRFPEEEEGGCELRVKFSRSADAPAYQQGQNQLYNELNLGRREEYDVLDKRRGRDPEMGGKPRRKNPQEGLYNELQKDKMAEAYSEIGMKGERRRGKGHDGLYQGLSTATKDTYDALHMQALPPRLEGGGEGRGSLLTCG

SEQ ID NO: 7343 - protein, 248 aa, Artificial Sequence
  source: /note="Description of Artificial Sequence: Synthetic Chimeric Antigen Receptor"
DIQMTQTTSSLSASLGDRVTISCRASQDISKYLNWYQQKPDGTVKLLIYHTSRLHSGVPSRFSGSGSGTDYSLTISNLEQEDIATYFCQQGNTLPYTFGGGTKLEITKAGGGGSGGGGSGGGGSGGGGSEVKLQESGPGLVAPSQSLSVTCTVSGVSLPDYGVSWIRQPPRKGLEWLGVIWGSETTYYNSALKSRLTIIKDNSKSQVFLKMNSLQTDDTAIYYCAKHYYYGGSYAMDYWGQGTSVTVS

SEQ ID NO: 7344 - protein, 254 aa, Artificial Sequence
  source: /note="Description of Artificial Sequence: Synthetic Chimeric Antigen Receptor"
RCDIQMTQSPSSLSASVGDRVTITCRASEDIYFNLVWYQQKPGKAPKLLIYDTNRLADGVPSRFSGSGSGTQYTLTISSLQPEDFATYYCQHYKNYPLTFGQGTKLEIKRSGGGGSGGGGSGGGGSGGGGSRSEVQLVESGGGLVQPGGSLRLSCAASGFTLSNYGMHWIRQAPGKGLEWVSSISLNGGSTYYRDSVKGRFTISRDNAKSTLYLQMNSLRAEDTAVYYCAAQDAYTGGYFDYWGQGTLVTVSSM

SEQ ID NO: 7345 - protein, 489 aa, Artificial Sequence
  source: /note="Description of Artificial Sequence: Synthetic Chimeric Antigen Receptor"
MALPVTALLLPLALLLHAARPDIQMTQTTSSLSASLGDRVTISCRASQDISKYLNWYQQKPDGTVKLLIYHTSRLHSGVPSRFSGSGSGTDYSLTISNLEQEDIATYFCQQGNTLPYTFGGGTKLEITGGGGSGGGGSGGGGSEVKLQESGPGLVAPSQSLSVTCTVSGVSLPDYGVSWIRQPPRKGLEWLGVIWGSETTYYNSALKSRLTIIKDNSKSQVFLKMNSLQTDDTAIYYCAKHYYYGGSYAMDYWGQGTSVTVSSTRTTTPAPRPPTPAPTIASQPLSLRPEACRPAAGGAVHTRGLDFACDIYIWAPLAGTCGVLLLSLVITLYCAVSLSKMLKKRSPLTTGVYVKMPPTEPECEKQFQPYFIPINSARVKFSRSADAPAYKQGQNQLYNELNLGRREEYDVLDKRRGRDPEMGGKPRRKNPQEGLYNELQKDKMAEAYSEIGMKGERRRGKGHDGLYQGLSTATKDTYDALHMQALPPR

SEQ ID NO: 7346 - protein, 522 aa, Artificial Sequence
  source: /note="Description of Artificial Sequence: Synthetic Chimeric Antigen Receptor"
MALPVTALLLPLALLLHAARPEIVMTQSPATLSLSPGERATLSCRASQDISKYLNWYQQKPGQAPRLLIYHTSRLHSGIPARFSGSGSGTDYTLTISSLQPEDFAVYFCQQGNTLPYTFGQGTKLEIKGGGGSGGGGSGGGGSQVQLQESGPGLVKPSETLSLTCTVSGVSLPDYGVSWIRQPPGKGLEWIGVIWGSETTYYSSSLKSRVTISKDNSKNQVSLKLSSVTAADTAVYYCAKHYYYGGSYAMDYWGQGTLVTVSSTTTPAPRPPTPAPTIASQPLSLRPEACRPAAGGAVHTRGLDFACDIYIWAPLAGTCGVLLLSLVITLYCALYLLRRDQRLPPDAHKPPGGGSFRTPIQEEQADAHSTLAKIRSKRSRLLHSDYMNMTPRRPGPTRKHYQPYAPPRDFAAYRSGVQVETISPGDGRTFPKRGQTCVVHYTGMLEDGKKFDSSRDRNKPFKFMLGKQEVIRGWEEGVAQMSVGQRAKLTISPDYAYGATGHPGIIPPHATLVFDVELLKLE

SEQ ID NO: 7347 - protein, 508 aa, Artificial Sequence
  source: /note="Description of Artificial Sequence: Synthetic Chimeric Antigen Receptor"
MALPVTALLLPLALLLHAARPEIVMTQSPATLSLSPGERATLSCRASQDISKYLNWYQQKPGQAPRLLIYHTSRLHSGIPARFSGSGSGTDYTLTISSLQPEDFAVYFCQQGNTLPYTFGQGTKLEIKGGGGSGGGGSGGGGSQVQLQESGPGLVKPSETLSLTCTVSGVSLPDYGVSWIRQPPGKGLEWIGVIWGSETTYYSSSLKSRVTISKDNSKNQVSLKLSSVTAADTAVYYCAKHYYYGGSYAMDYWGQGTLVTVSSTTTPAPRPPTPAPTIASQPLSLRPEACRPAAGGAVHTRGLDFACDIYIWAPLAGTCGVLLLSLVITLYCALYLLRRDQRLPPDAHKPPGGGSFRTPIQEEQADAHSTLAKIRSKRSRLLHSDYMNMTPRRPGPTRKHYQPYAPPRDFAAYRSILWHEMWHEGLIEASRLYFGERNVKGMFEVLEPLHAMMERGPQTLKETSFNQAYGRDLMEAQEWCRKYMKSGNVKDLLQAWDLYYHVFRRISK

SEQ ID NO: 7348 - protein, 528 aa, Artificial Sequence
  source: /note="Description of Artificial Sequence: Synthetic Chimeric Antigen Receptor"
MALPVTALLLPLALLLHAARPEIVMTQSPATLSLSPGERATLSCRASQDISKYLNWYQQKPGQAPRLLIYHTSRLHSGIPARFSGSGSGTDYTLTISSLQPEDFAVYFCQQGNTLPYTFGQGTKLEIKGGGGSGGGGSGGGGSQVQLQESGPGLVKPSETLSLTCTVSGVSLPDYGVSWIRQPPGKGLEWIGVIWGSETTYYSSSLKSRVTISKDNSKNQVSLKLSSVTAADTAVYYCAKHYYYGGSYAMDYWGQGTLVTVSSTTTPAPRPPTPAPTIASQPLSLRPEACRPAAGGAVHTRGLDFACDIYIWAPLAGTCGVLLLSLVITLYCQRRKYRSNKGESPVEPAEPCHYSCPREEEGSTIPIQEDYRKPEPACSPRSKRSRLLHSDYMNMTPRRPGPTRKHYQPYAPPRDFAAYRSGVQVETISPGDGRTFPKRGQTCVVHYTGMLEDGKKFDSSRDRNKPFKFMLGKQEVIRGWEEGVAQMSVGQRAKLTISPDYAYGATGHPGIIPPHATLVFDVELLKLE

SEQ ID NO: 7349 - protein, 514 aa, Artificial Sequence
  source: /note="Description of Artificial Sequence: Synthetic Chimeric Antigen Receptor"
MALPVTALLLPLALLLHAARPEIVMTQSPATLSLSPGERATLSCRASQDISKYLNWYQQKPGQAPRLLIYHTSRLHSGIPARFSGSGSGTDYTLTISSLQPEDFAVYFCQQGNTLPYTFGQGTKLEIKGGGGSGGGGSGGGGSQVQLQESGPGLVKPSETLSLTCTVSGVSLPDYGVSWIRQPPGKGLEWIGVIWGSETTYYSSSLKSRVTISKDNSKNQVSLKLSSVTAADTAVYYCAKHYYYGGSYAMDYWGQGTLVTVSSTTTPAPRPPTPAPTIASQPLSLRPEACRPAAGGAVHTRGLDFACDIYIWAPLAGTCGVLLLSLVITLYCQRRKYRSNKGESPVEPAEPCHYSCPREEEGSTIPIQEDYRKPEPACSPRSKRSRLLHSDYMNMTPRRPGPTRKHYQPYAPPRDFAAYRSILWHEMWHEGLIEASRLYFGERNVKGMFEVLEPLHAMMERGPQTLKETSFNQAYGRDLMEAQEWCRKYMKSGNVKDLLQAWDLYYHVFRRISK

SEQ ID NO: 7350 - protein, 522 aa, Artificial Sequence
  source: /note="Description of Artificial Sequence: Synthetic Chimeric Antigen Receptor"
MALPVTALLLPLALLLHAARPEIVMTQSPATLSLSPGERATLSCRASQDISKYLNWYQQKPGQAPRLLIYHTSRLHSGIPARFSGSGSGTDYTLTISSLQPEDFAVYFCQQGNTLPYTFGQGTKLEIKGGGGSGGGGSGGGGSQVQLQESGPGLVKPSETLSLTCTVSGVSLPDYGVSWIRQPPGKGLEWIGVIWGSETTYYSSSLKSRVTISKDNSKNQVSLKLSSVTAADTAVYYCAKHYYYGGSYAMDYWGQGTLVTVSSTTTPAPRPPTPAPTIASQPLSLRPEACRPAAGGAVHTRGLDFACDIYIWAPLAGTCGVLLLSLVITLYCKRGRKKLLYIFKQPFMRPVQTTQEEDGCSCRFPEEEEGGCELRSKRSRLLHSDYMNMTPRRPGPTRKHYQPYAPPRDFAAYRSGVQVETISPGDGRTFPKRGQTCVVHYTGMLEDGKKFDSSRDRNKPFKFMLGKQEVIRGWEEGVAQMSVGQRAKLTISPDYAYGATGHPGIIPPHATLVFDVELLKLE

SEQ ID NO: 7351 - protein, 508 aa, Artificial Sequence
  source: /note="Description of Artificial Sequence: Synthetic Chimeric Antigen Receptor"
MALPVTALLLPLALLLHAARPEIVMTQSPATLSLSPGERATLSCRASQDISKYLNWYQQKPGQAPRLLIYHTSRLHSGIPARFSGSGSGTDYTLTISSLQPEDFAVYFCQQGNTLPYTFGQGTKLEIKGGGGSGGGGSGGGGSQVQLQESGPGLVKPSETLSLTCTVSGVSLPDYGVSWIRQPPGKGLEWIGVIWGSETTYYSSSLKSRVTISKDNSKNQVSLKLSSVTAADTAVYYCAKHYYYGGSYAMDYWGQGTLVTVSSTTTPAPRPPTPAPTIASQPLSLRPEACRPAAGGAVHTRGLDFACDIYIWAPLAGTCGVLLLSLVITLYCKRGRKKLLYIFKQPFMRPVQTTQEEDGCSCRFPEEEEGGCELRSKRSRLLHSDYMNMTPRRPGPTRKHYQPYAPPRDFAAYRSILWHEMWHEGLIEASRLYFGERNVKGMFEVLEPLHAMMERGPQTLKETSFNQAYGRDLMEAQEWCRKYMKSGNVKDLLQAWDLYYHVFRRISK

SEQ ID NO: 7352 - protein, 495 aa, Artificial Sequence; identical to SEQ ID NO: 5754
  source: /note="Description of Artificial Sequence: Synthetic Chimeric Antigen Receptor"

SEQ ID NO: 7353 - protein, 495 aa, Artificial Sequence; identical to SEQ ID NO: 5754
  source: /note="Description of Artificial Sequence: Synthetic Chimeric Antigen Receptor"

SEQ ID NO: 7354 - protein, 495 aa, Artificial Sequence; identical to SEQ ID NO: 5754
  source: /note="Description of Artificial Sequence: Synthetic Chimeric Antigen Receptor"

SEQ ID NO: 7355 - protein, 495 aa, Artificial Sequence; identical to SEQ ID NO: 5754
  source: /note="Description of Artificial Sequence: Synthetic Chimeric Antigen Receptor"

SEQ ID NO: 7356 - protein, 495 aa, Artificial Sequence; identical to SEQ ID NO: 5754
  source: /note="Description of Artificial Sequence: Synthetic Chimeric Antigen Receptor"

SEQ ID NO: 7357 - protein, 495 aa, Artificial Sequence; identical to SEQ ID NO: 5754
  source: /note="Description of Artificial Sequence: Synthetic Chimeric Antigen Receptor"

SEQ ID NO: 7358 - protein, 495 aa, Artificial Sequence; identical to SEQ ID NO: 5754
  source: /note="Description of Artificial Sequence: Synthetic Chimeric Antigen Receptor"

SEQ ID NO: 7359 - protein, 495 aa, Artificial Sequence; identical to SEQ ID NO: 5754
  source: /note="Description of Artificial Sequence: Synthetic Chimeric Antigen Receptor"

SEQ ID NO: 7360 - protein, 251 aa, Artificial Sequence; identical to SEQ ID NO: 5833
  source: /note="Description of Artificial Sequence: Synthetic Chimeric Antigen Receptor"

SEQ ID NO: 7361 - protein, 495 aa, Artificial Sequence; identical to SEQ ID NO: 5754
  source: /note="Description of Artificial Sequence: Synthetic Chimeric Antigen Receptor"

SEQ ID NO: 7362 - protein, 495 aa, Artificial Sequence; identical to SEQ ID NO: 5754
  source: /note="Description of Artificial Sequence: Synthetic Chimeric Antigen Receptor"

SEQ ID NO: 7363 - protein, 495 aa, Artificial Sequence; identical to SEQ ID NO: 5754
  source: /note="Description of Artificial Sequence: Synthetic Chimeric Antigen Receptor"

SEQ ID NO: 7364 - protein, 495 aa, Artificial Sequence; identical to SEQ ID NO: 7339
  source: /note="Description of Artificial Sequence: Synthetic Chimeric Antigen Receptor"

SEQ ID NO: 7365 - protein, 495 aa, Artificial Sequence; identical to SEQ ID NO: 5754
  source: /note="Description of Artificial Sequence: Synthetic Chimeric Antigen Receptor"

SEQ ID NO: 7366 - protein, 495 aa, Artificial Sequence; identical to SEQ ID NO: 7339
  source: /note="Description of Artificial Sequence: Synthetic Chimeric Antigen Receptor"

SEQ ID NO: 7367 - protein, 495 aa, Artificial Sequence; identical to SEQ ID NO: 5754
  source: /note="Description of Artificial Sequence: Synthetic Chimeric Antigen Receptor"

SEQ ID NO: 7368 - protein, 495 aa, Artificial Sequence; identical to SEQ ID NO: 7339
  source: /note="Description of Artificial Sequence: Synthetic Chimeric Antigen Receptor"

SEQ ID NO: 7369 - protein, 495 aa, Artificial Sequence; identical to SEQ ID NO: 5754
  source: /note="Description of Artificial Sequence: Synthetic Chimeric Antigen Receptor"

SEQ ID NO: 7370 - protein, 494 aa, Artificial Sequence
  source: /note="Description of Artificial Sequence: Synthetic Chimeric Antigen Receptor"
METDTLLLWVLLLWVPGSTGDIQMTQTTSSLSASLGDRVTISCRASQDISKYLNWYQQKPDGTVKLLIYHTSRLHSGVPSRFSGSGSGTDYSLTISNLEQEDIATYFCQQGNTLPYTFGGGTKLEITKAGGGGSGGGGSGGGGSGGGGSEVKLQESGPGLVAPSQSLSVTCTVSGVSLPDYGVSWIRQPPRKGLEWLGVIWGSETTYYNSALKSRLTIIKDNSKSQVFLKMNSLQTDDTAIYYCAKHYYYGGSYAMDYWGQGTSVTVSSDPTTTPAPRPPTPAPTIASQPLSLRPEACRPAAGGAVHTRGLDFACDIYIWAPLAGTCGVLLLSLVITLYCKRGRKKLLYIFKQPFMRPVQTTQEEDGCSCRFPEEEEGGCELRVKFSRSADAPAYQQGQNQLYNELNLGRREEYDVLDKRRGRDPEMGGKPRRKNPQEGLYNELQKDKMAEAYSEIGMKGERRRGKGHDGLYQGLSTATKDTYDALHMQALPPR

SEQ ID NO: 7371 - protein, 494 aa, Artificial Sequence; identical to SEQ ID NO: 7370
  source: /note="Description of Artificial Sequence: Synthetic Chimeric Antigen Receptor"

SEQ ID NO: 7372 - protein, 144 aa, Artificial Sequence
  source: /note="Description of Artificial Sequence: Synthetic Chimeric Antigen Receptor"
MALPVTALLLPLALLLHAARPDIQMTQTTSSLSASLGDRVTISCRASQDISKYLNWYQQKPDGTVKLLIYHTSRLHSGVPSRFSGSGSGTDYSLTISNLEQEDIATYFCQQGNTLPYTFGGGTKLEITGGGGSGGGGSGGGGSE

SEQ ID NO: 7373 - protein, 486 aa, Artificial Sequence; identical to SEQ ID NO: 7332
  source: /note="Description of Artificial Sequence: Synthetic Chimeric Antigen Receptor"

SEQ ID NO: 7374 - protein, 486 aa, Artificial Sequence
  source: /note="Description of Artificial Sequence: Synthetic Chimeric Antigen Receptor"
MALPVTALLLPLALLLHAARPEIVMTQSPATLSLSPGERATLSCRASQDISKYLNWYQQKPGQAPRLLIYHTSRLHSGIPARFSGSGSGTDYTLTISSLQPEDFAVYFCQQGNTLPYTFGQGTKLEIKGGGGSGGGGSGGGGSQVQLQESGPGLVKPSETLSLTCTVSGVSLPDYGVSWIRQPPGKGLEWIGVIWGSETTYYQSSLKSRVTISKDNSKNQVSLKLSSVTAADTAVYYCAKHYYYGGSYAMDYWGQGTLVTVSSTTTPAPRPPTPAPTIASQPLSLRPEACRPAAGGAVHTRGLDFACDIYIWAPLAGTCGVLLLSLVITLYCKRGRKKLLYIFKQPFMRPVQTTQEEDGCSCRFPEEEEGGCELRVKFSRSADAPAYKQGQNQLYNELNLGRREEYDVLDKRRGRDPEMGGKPRRKNPQEGLYNELQKDKMAEAYSEIGMKGERRRGKGHDGLYQGLSTATKDTYDALHMQALPPR

SEQ ID NO: 7375 - protein, 486 aa, Artificial Sequence
  source: /note="Description of Artificial Sequence: Synthetic Chimeric Antigen Receptor"
MALPVTALLLPLALLLHAARPQVQLQESGPGLVKPSETLSLTCTVSGVSLPDYGVSWIRQPPGKGLEWIGVIWGSETTYYSSSLKSRVTISKDNSKNQVSLKLSSVTAADTAVYYCAKHYYYGGSYAMDYWGQGTLVTVSSGGGGSGGGGSGGGGSEIVMTQSPATLSLSPGERATLSCRASQDISKYLNWYQQKPGQAPRLLIYHTSRLHSGIPARFSGSGSGTDYTLTISSLQPEDFAVYFCQQGNTLPYTFGQGTKLEIKTTTPAPRPPTPAPTIASQPLSLRPEACRPAAGGAVHTRGLDFACDIYIWAPLAGTCGVLLLSLVITLYCKRGRKKLLYIFKQPFMRPVQTTQEEDGCSCRFPEEEEGGCELRVKFSRSADAPAYKQGQNQLYNELNLGRREEYDVLDKRRGRDPEMGGKPRRKNPQEGLYNELQKDKMAEAYSEIGMKGERRRGKGHDGLYQGLSTATKDTYDALHMQALPPR

SEQ ID NO: 7376 - protein, 486 aa, Artificial Sequence
  source: /note="Description of Artificial Sequence: Synthetic Chimeric Antigen Receptor"
MALPVTALLLPLALLLHAARPQVQLQESGPGLVKPSETLSLTCTVSGVSLPDYGVSWIRQPPGKGLEWIGVIWGSETTYYQSSLKSRVTISKDNSKNQVSLKLSSVTAADTAVYYCAKHYYYGGSYAMDYWGQGTLVTVSSGGGGSGGGGSGGGGSEIVMTQSPATLSLSPGERATLSCRASQDISKYLNWYQQKPGQAPRLLIYHTSRLHSGIPARFSGSGSGTDYTLTISSLQPEDFAVYFCQQGNTLPYTFGQGTKLEIKTTTPAPRPPTPAPTIASQPLSLRPEACRPAAGGAVHTRGLDFACDIYIWAPLAGTCGVLLLSLVITLYCKRGRKKLLYIFKQPFMRPVQTTQEEDGCSCRFPEEEEGGCELRVKFSRSADAPAYKQGQNQLYNELNLGRREEYDVLDKRRGRDPEMGGKPRRKNPQEGLYNELQKDKMAEAYSEIGMKGERRRGKGHDGLYQGLSTATKDTYDALHMQALPPR

SEQ ID NO: 7377 - protein, 491 aa, Artificial Sequence
  source: /note="Description of Artificial Sequence: Synthetic Chimeric Antigen Receptor"
MALPVTALLLPLALLLHAARPEIVMTQSPATLSLSPGERATLSCRASQDISKYLNWYQQKPGQAPRLLIYHTSRLHSGIPARFSGSGSGTDYTLTISSLQPEDFAVYFCQQGNTLPYTFGQGTKLEIKGGGGSGGGGSGGGGSGGGGSQVQLQESGPGLVKPSETLSLTCTVSGVSLPDYGVSWIRQPPGKGLEWIGVIWGSETTYYSSSLKSRVTISKDNSKNQVSLKLSSVTAADTAVYYCAKHYYYGGSYAMDYWGQGTLVTVSSTTTPAPRPPTPAPTIASQPLSLRPEACRPAAGGAVHTRGLDFACDIYIWAPLAGTCGVLLLSLVITLYCKRGRKKLLYIFKQPFMRPVQTTQEEDGCSCRFPEEEEGGCELRVKFSRSADAPAYKQGQNQLYNELNLGRREEYDVLDKRRGRDPEMGGKPRRKNPQEGLYNELQKDKMAEAYSEIGMKGERRRGKGHDGLYQGLSTATKDTYDALHMQALPPR

SEQ ID NO: 7378 - protein, 491 aa, Artificial Sequence
  source: /note="Description of Artificial Sequence: Synthetic Chimeric Antigen Receptor"
MALPVTALLLPLALLLHAARPEIVMTQSPATLSLSPGERATLSCRASQDISKYLNWYQQKPGQAPRLLIYHTSRLHSGIPARFSGSGSGTDYTLTISSLQPEDFAVYFCQQGNTLPYTFGQGTKLEIKGGGGSGGGGSGGGGSGGGGSQVQLQESGPGLVKPSETLSLTCTVSGVSLPDYGVSWIRQPPGKGLEWIGVIWGSETTYYQSSLKSRVTISKDNSKNQVSLKLSSVTAADTAVYYCAKHYYYGGSYAMDYWGQGTLVTVSSTTTPAPRPPTPAPTIASQPLSLRPEACRPAAGGAVHTRGLDFACDIYIWAPLAGTCGVLLLSLVITLYCKRGRKKLLYIFKQPFMRPVQTTQEEDGCSCRFPEEEEGGCELRVKFSRSADAPAYKQGQNQLYNELNLGRREEYDVLDKRRGRDPEMGGKPRRKNPQEGLYNELQKDKMAEAYSEIGMKGERRRGKGHDGLYQGLSTATKDTYDALHMQALPPR

SEQ ID NO: 7379 - protein, 491 aa, Artificial Sequence
  source: /note="Description of Artificial Sequence: Synthetic Chimeric Antigen Receptor"
MALPVTALLLPLALLLHAARPQVQLQESGPGLVKPSETLSLTCTVSGVSLPDYGVSWIRQPPGKGLEWIGVIWGSETTYYSSSLKSRVTISKDNSKNQVSLKLSSVTAADTAVYYCAKHYYYGGSYAMDYWGQGTLVTVSSGGGGSGGGGSGGGGSGGGGSEIVMTQSPATLSLSPGERATLSCRASQDISKYLNWYQQKPGQAPRLLIYHTSRLHSGIPARFSGSGSGTDYTLTISSLQPEDFAVYFCQQGNTLPYTFGQGTKLEIKTTTPAPRPPTPAPTIASQPLSLRPEACRPAAGGAVHTRGLDFACDIYIWAPLAGTCGVLLLSLVITLYCKRGRKKLLYIFKQPFMRPVQTTQEEDGCSCRFPEEEEGGCELRVKFSRSADAPAYKQGQNQLYNELNLGRREEYDVLDKRRGRDPEMGGKPRRKNPQEGLYNELQKDKMAEAYSEIGMKGERRRGKGHDGLYQGLSTATKDTYDALHMQALPPR

SEQ ID NO: 7380 - protein, 491 aa, Artificial Sequence
  source: /note="Description of Artificial Sequence: Synthetic Chimeric Antigen Receptor"
MALPVTALLLPLALLLHAARPQVQLQESGPGLVKPSETLSLTCTVSGVSLPDYGVSWIRQPPGKGLEWIGVIWGSETTYYQSSLKSRVTISKDNSKNQVSLKLSSVTAADTAVYYCAKHYYYGGSYAMDYWGQGTLVTVSSGGGGSGGGGSGGGGSGGGGSEIVMTQSPATLSLSPGERATLSCRASQDISKYLNWYQQKPGQAPRLLIYHTSRLHSGIPARFSGSGSGTDYTLTISSLQPEDFAVYFCQQGNTLPYTFGQGTKLEIKTTTPAPRPPTPAPTIASQPLSLRPEACRPAAGGAVHTRGLDFACDIYIWAPLAGTCGVLLLSLVITLYCKRGRKKLLYIFKQPFMRPVQTTQEEDGCSCRFPEEEEGGCELRVKFSRSADAPAYKQGQNQLYNELNLGRREEYDVLDKRRGRDPEMGGKPRRKNPQEGLYNELQKDKMAEAYSEIGMKGERRRGKGHDGLYQGLSTATKDTYDALHMQALPPR

SEQ ID NO: 7381 - protein, 491 aa, Artificial Sequence
  source: /note="Description of Artificial Sequence: Synthetic Chimeric Antigen Receptor"
MALPVTALLLPLALLLHAARPEIVMTQSPATLSLSPGERATLSCRASQDISKYLNWYQQKPGQAPRLLIYHTSRLHSGIPARFSGSGSGTDYTLTISSLQPEDFAVYFCQQGNTLPYTFGQGTKLEIKGGGGSGGGGSGGGGSGGGGSQVQLQESGPGLVKPSETLSLTCTVSGVSLPDYGVSWIRQPPGKGLEWIGVIWGSETTYYNSSLKSRVTISKDNSKNQVSLKLSSVTAADTAVYYCAKHYYYGGSYAMDYWGQGTLVTVSSTTTPAPRPPTPAPTIASQPLSLRPEACRPAAGGAVHTRGLDFACDIYIWAPLAGTCGVLLLSLVITLYCKRGRKKLLYIFKQPFMRPVQTTQEEDGCSCRFPEEEEGGCELRVKFSRSADAPAYKQGQNQLYNELNLGRREEYDVLDKRRGRDPEMGGKPRRKNPQEGLYNELQKDKMAEAYSEIGMKGERRRGKGHDGLYQGLSTATKDTYDALHMQALPPR

SEQ ID NO: 7382 - protein, 491 aa, Artificial Sequence; identical to SEQ ID NO: 7381
  source: /note="Description of Artificial Sequence: Synthetic Chimeric Antigen Receptor"

SEQ ID NO: 7383 - protein, 491 aa, Artificial Sequence
  source: /note="Description of Artificial Sequence: Synthetic Chimeric Antigen Receptor"
MALPVTALLLPLALLLHAARPQVQLQESGPGLVKPSETLSLTCTVSGVSLPDYGVSWIRQPPGKGLEWIGVIWGSETTYYNSSLKSRVTISKDNSKNQVSLKLSSVTAADTAVYYCAKHYYYGGSYAMDYWGQGTLVTVSSGGGGSGGGGSGGGGSGGGGSEIVMTQSPATLSLSPGERATLSCRASQDISKYLNWYQQKPGQAPRLLIYHTSRLHSGIPARFSGSGSGTDYTLTISSLQPEDFAVYFCQQGNTLPYTFGQGTKLEIKTTTPAPRPPTPAPTIASQPLSLRPEACRPAAGGAVHTRGLDFACDIYIWAPLAGTCGVLLLSLVITLYCKRGRKKLLYIFKQPFMRPVQTTQEEDGCSCRFPEEEEGGCELRVKFSRSADAPAYKQGQNQLYNELNLGRREEYDVLDKRRGRDPEMGGKPRRKNPQEGLYNELQKDKMAEAYSEIGMKGERRRGKGHDGLYQGLSTATKDTYDALHMQALPPR

SEQ ID NO: 7384 - protein, 486 aa, Artificial Sequence
  source: /note="Description of Artificial Sequence: Synthetic Chimeric Antigen Receptor"
MALPVTALLLPLALLLHAARPEIVMTQSPATLSLSPGERATLSCRASQDISKYLNWYQQKPGQAPRLLIYHTSRLHSGIPARFSGSGSGTDYTLTISSLQPEDFAVYFCQQGNTLPYTFGQGTKLEIKGGGGSGGGGSGGGGSQVQLQESGPGLVKPSETLSLTCTVSGVSLPDYGVSWIRQPPGKGLEWIGVIWGSETTYYNSSLKSRVTISKDNSKNQVSLKLSSVTAADTAVYYCAKHYYYGGSYAMDYWGQGTLVTVSSTTTPAPRPPTPAPTIASQPLSLRPEACRPAAGGAVHTRGLDFACDIYIWAPLAGTCGVLLLSLVITLYCKRGRKKLLYIFKQPFMRPVQTTQEEDGCSCRFPEEEEGGCELRVKFSRSADAPAYKQGQNQLYNELNLGRREEYDVLDKRRGRDPEMGGKPRRKNPQEGLYNELQKDKMAEAYSEIGMKGERRRGKGHDGLYQGLSTATKDTYDALHMQALPPR

SEQ ID NO: 7385 - protein, 486 aa, Artificial Sequence; identical to SEQ ID NO: 7333
  source: /note="Description of Artificial Sequence: Synthetic Chimeric Antigen Receptor"

SEQ ID NO: 7386 - protein, 495 aa, Artificial Sequence; identical to SEQ ID NO: 7339
  source: /note="Description of Artificial Sequence: Synthetic Chimeric Antigen Receptor"

SEQ ID NO: 7387 - protein, 495 aa, Artificial Sequence; identical to SEQ ID NO: 5754
  source: /note="Description of Artificial Sequence: Synthetic Chimeric Antigen Receptor"

SEQ ID NO: 7388 - protein, 530 aa, Artificial Sequence
  source: /note="Description of Artificial Sequence: Synthetic Chimeric Antigen Receptor"
MALPVTALLLPLALLLHAARPDIMMTQSPSSLAVSAGEKVTMTCKSSQSVLYSSNQKNYLAWYQQKPGQSPKLLIYWASTRESGVPDRFTGSGSGTDFTLTISSVQPEDLAVYYCHQYLSSHTFGGGTKLEIKRGGGGSGGGGSGGGGSQLQQPGAELVRPGSSVKLSCKASGYTFTRYWIHWVKQRPIQGLEWIGNIDPSDSETHYNQKFKDKATLTVDKSSGTAYMQLSSLTSEDSAVYYCATEDLYYAMEYWGQGTSVTVSSTTTPAPRPPTPAPTIASQPLSLRPEACRPAAGGAVHTRGLDFACDIYIWAPLAGTCGVLLLSLVITLYCRSKRSRLLHSDYMNMTPRRPGPTRKHYQPYAPPRDFAAYRSKRGRKKLLYIFKQPFMRPVQTTQEEDGCSCRFPEEEEGGCELRVKFSRSADAPAYQQGQNQLYNELNLGRREEYDVLDKRRGRDPEMGGKPQRRKNPQEGLYNELQKDKMAEAYSEIGMKGERRRGKGHDGLYQGLSTATKDTYDALHMQALPPR

SEQ ID NO: 7389 - protein, 486 aa, Artificial Sequence; identical to SEQ ID NO: 7374
  source: /note="Description of Artificial Sequence: Synthetic Chimeric Antigen Receptor"

SEQ ID NO: 7390 - protein, 486 aa, Artificial Sequence; identical to SEQ ID NO: 7375
  source: /note="Description of Artificial Sequence: Synthetic Chimeric Antigen Receptor"

SEQ ID NO: 7391 - protein, 486 aa, Artificial Sequence; identical to SEQ ID NO: 7376
  source: /note="Description of Artificial Sequence: Synthetic Chimeric Antigen Receptor"

SEQ ID NO: 7392 - protein, 491 aa, Artificial Sequence; identical to SEQ ID NO: 7377
  source: /note="Description of Artificial Sequence: Synthetic Chimeric Antigen Receptor"

SEQ ID NO: 7393 - protein, 491 aa, Artificial Sequence; identical to SEQ ID NO: 7378
  source: /note="Description of Artificial Sequence: Synthetic Chimeric Antigen Receptor"

SEQ ID NO: 7394 - protein, 491 aa, Artificial Sequence; identical to SEQ ID NO: 7379
  source: /note="Description of Artificial Sequence: Synthetic Chimeric Antigen Receptor"

SEQ ID NO: 7395 - protein, 491 aa, Artificial Sequence; identical to SEQ ID NO: 7380
  source: /note="Description of Artificial Sequence: Synthetic Chimeric Antigen Receptor"

SEQ ID NO: 7396 - protein, 491 aa, Artificial Sequence; identical to SEQ ID NO: 7381
  source: /note="Description of Artificial Sequence: Synthetic Chimeric Antigen Receptor"

SEQ ID NO: 7397 - protein, 491 aa, Artificial Sequence; identical to SEQ ID NO: 7381
  source: /note="Description of Artificial Sequence: Synthetic Chimeric Antigen Receptor"

SEQ ID NO: 7398 - protein, 491 aa, Artificial Sequence; identical to SEQ ID NO: 7383
  source: /note="Description of Artificial Sequence: Synthetic Chimeric Antigen Receptor"

SEQ ID NO: 7399 - protein, 486 aa, Artificial Sequence; identical to SEQ ID NO: 7384
  source: /note="Description of Artificial Sequence: Synthetic Chimeric Antigen Receptor"

SEQ ID NO: 7400 - protein, 465 aa, Artificial Sequence
  source: /note="Description of Artificial Sequence: Synthetic Chimeric Antigen Receptor"
MGTSLLCWMALCLLGADHADAQVQLQQSGPELVKPGASVKISCKASGYAFSSSWMNWVKQRPGKGLEWIGRIYPGDEDTNYSGKFKDKATLTADKSSTTAYMQLSSLTSEDSAVYFCARSLLYGDYLDYWGQGTTLTVSSGGGGSGGGGSGGGGSQIVLTQSPAIMSASPGEKVTMTCSASSSVSYMHWYQQKSGTSPKRWIYDTSKLASGVPDRFSGSGSGTSYFLTINNMEAEDAATYYCQQWNINPLTFGAGTKLELKRSDPAEPKSPDKTHTCPPCPKDPKFWVLVVVGGVLACYSLLVTVAFIIFWVRSKRSRLLHSDYMNMTPRRPGPTRKHYQPYAPPRDFAAYRSRVKFSRSADAPAYQQGQNQLYNELNLGRREEYDVLDKRRGRDPEMGGKPRRKNPQEGLYNELQKDKMAEAYSEIGMKGERRRGKGHDGLYQGLSTATKDTYDALHMQALPPR

SEQ ID NO: 7401 - protein, 681 aa, Artificial Sequence
  source: /note="Description of Artificial Sequence: Synthetic Chimeric Antigen Receptor"
MGTSLLCWMALCLLGADHADAQVQLQQSGPELVKPGASVKISCKASGYAFSSSWMNWVKQRPGKGLEWIGRIYPGDEDTNYSGKFKDKATLTADKSSTTAYMQLSSLTSEDSAVYFCARSLLYGDYLDYWGQGTTLTVSSGGGGSGGGGSGGGGSQIVLTQSPAIMSASPGEKVTMTCSASSSVSYMHWYQQKSGTSPKRWIYDTSKLASGVPDRFSGSGSGTSYFLTINNMEAEDAATYYCQQWNINPLTFGAGTKLELKRSDPAEPKSPDKTHTCPPCPAPPVAGPSVFLFPPKPKDTLMIARTPEVTCVVVDVSHEDPEVKFNWYVDGVEVHNAKTKPREEQYNSTYRVVSVLTVLHQDWLNGKEYKCKVSNKALPAPIEKTISKAKGQPREPQVYTLPPSRDELTKNQVSLTCLVKGFYPSDIAVEWESNGQPENNYKTTPPVLDSDGSFFLYSKLTVDKSRWQQGNVFSCSVMHEALHNHYTQKSLSLSPGKKDPKFWVLVVVGGVLACYSLLVTVAFIIFWVRSKRSRLLHSDYMNMTPRRPGPTRKHYQPYAPPRDFAAYRSRVKFSRSADAPAYQQGQNQLYNELNLGRREEYDVLDKRRGRDPEMGGKPRRKNPQEGLYNELQKDKMAEAYSEIGMKGERRRGKGHDGLYQGLSTATKDTYDALHMQALPPR

SEQ ID NO: 7402 - protein, 838 aa, Artificial Sequence
  source: /note="Description of Artificial Sequence: Synthetic Chimeric Antigen Receptor"
MLLLVTSLLLCELPHPAFLLIPQSVKESEGDLVTPAGNLTLTCTASGSDINDYPISWVRQAPGKGLEWIGFINSGGSTWYASWVKGRFTISRTSTTVDLKMTSLTTDDTATYFCARGYSTYYGDFNIWGPGTLVTISSGGGGSGGGGSGGGGSELVMTQTPSSTSGAVGGTVTINCQASQSIDSNLAWFQQKPGQPPTLLIYRASNLASGVPSRFSGSRSGTEYTLTISGVQREDAATYYCLGGVGNVSYRTSFGGGTEVVVKESKYGPPCPPCPMFWVLVVVGGVLACYSLLVTVAFIIFWVKRGRKKLLYIFKQPFMRPVQTTQEEDGCSCRFPEEEEGGCELRVKFSRSADAPAYQQGQNQLYNELNLGRREEYDVLDKRRGRDPEMGGKPRRKNPQEGLYNELQKDKMAEAYSEIGMKGERRRGKGHDGLYQGLSTATKDTYDALHMQALPPRLEGGGEGRGSLLTCGDVEENPGPRMLLLVTSLLLCELPHPAFLLIPRKVCNGIGIGEFKDSLSINATNIKHFKNCTSISGDLHILPVAFRGDSFTHTPPLDPQELDILKTVKEITGFLLIQAWPENRTDLHAFENLEIIRGRTKQHGQFSLAVVSLNITSLGLRSLKEISDGDVIISGNKNLCYANTINWKKLFGTSGQKTKIISNRGENSCKATGQVCHALCSPEGCWGPEPRDCVSCRNVSRGRECVDKCNLLEGEPREFVENSECIQCHPECLPQAMNITCTGRGPDNCIQCAHYIDGPHCVKTCPAGVMGENNTLVWKYADAGHVCHLCHPNCTYGCTGPGLEGCPTNGPKIPSIATGMVGALLLLLVVALGIGLFM

SEQ ID NO: 7403 - protein, 1055 aa, Artificial Sequence [sequence omitted]

SEQ ID NO: 7404 - protein, 945 aa, Artificial Sequence
  source: /note="Description of Artificial Sequence: Synthetic Chimeric Antigen Receptor"
MLLLVTSLLLCELPHPAFLLIPQSVKESEGDLVTPAGNLTLTCTASGSDINDYPISWVRQAPGKGLEWIGFINSGGSTWYASWVKGRFTISRTSTTVDLKMTSLTTDDTATYFCARGYSTYYGDFNIWGPGTLVTISSGGGGSGGGGSGGGGSELVMTQTPSSTSGAVGGTVTINCQASQSIDSNLAWFQQKPGQPPTLLIYRASNLASGVPSRFSGSRSGTEYTLTISGVQREDAATYYCLGGVGNVSYRTSFGGGTEVVVKESKYGPPCPPCPGQPREPQVYTLPPSQEEMTKNQVSLTCLVKGFYPSDIAVEWESNGQPENNYKTTPPVLDSDGSFFLYSRLTVDKSRWQEGNVFSCSVMHEALHNHYTQKSLSLSLGKMFWVLVVVGGVLACYSLLVTVAFIIFWVKRGRKKLLYIFKQPFMRPVQTTQEEDGCSCRFPEEEEGGCELRVKFSRSADAPAYQQGQNQLYNELNLGRREEYDVLDKRRGRDPEMGGKPRRKNPQEGLYNELQKDKMAEAYSEIGMKGERRRGKGHDGLYQGLSTATKDTYDALHMQALPPRLEGGGEGRGSLLTCGDVEENPGPRMLLLVTSLLLCELPHPAFLLIPRKVCNGIGIGEFKDSLSINATNIKHFKNCTSISGDLHILPVAFRGDSFTHTPPLDPQELDILKTVKEITGFLLIQAWPENRTDLHAFENLEIIRGRTKQHGQFSLAVVSLNITSLGLRSLKEISDGDVIISGNKNLCYANTINWKKLFGTSGQKTKIISNRGENSCKATGQVCHALCSPEGCWGPEPRDCVSCRNVSRGRECVDKCNLLEGEPREFVENSECIQCHPECLPQAMNITCTGRGPDNCIQCAHYIDGPHCVKTCPAGVMGENNTLVWKYADAGHVCHLCHPNCTYGCTGPGLEGCPTNGPKIPSIATGMVGALLLLLVVALGIGLFM

SEQ ID NO: 7405 - protein, 845 aa, Artificial Sequence
  source: /note="Description of Artificial Sequence: Synthetic Chimeric Antigen Receptor"
MLLLVTSLLLCELPHPAFLLIPQEQLVESGGRLVTPGGSLTLSCKASGFDFSAYYMSWVRQAPGKGLEWIATIYPSSGKTYYATWVNGRFTISSDNAQNTVDLQMNSLTAADRATYFCARDSYADDGALFNIWGPGTLVTISSGGGGSGGGGSGGGGSELVLTQSPSVSAALGSPAKITCTLSSAHKTDTIDWYQQLQGEAPRYLMQVQSDGSYTKRPGVPDRFSGSSSGADRYLIIPSVQADDEADYYCGADYIGGYVFGGGTQLTVTGESKYGPPCPPCPMFWVLVVVGGVLACYSLLVTVAFIIFWVKRGRKKLLYIFKQPFMRPVQTTQEEDGCSCRFPEEEEGGCELRVKFSRSADAPAYQQGQNQLYNELNLGRREEYDVLDKRRGRDPEMGGKPRRKNPQEGLYNELQKDKMAEAYSEIGMKGERRRGKGHDGLYQGLSTATKDTYDALHMQALPPRLEGGGEGRGSLLTCGDVEENPGPRMLLLVTSLLLCELPHPAFLLIPRKVCNGIGIGEFKDSLSINATNIKHFKNCTSISGDLHILPVAFRGDSFTHTPPLDPQELDILKTVKEITGFLLIQAWPENRTDLHAFENLEIIRGRTKQHGQFSLAVVSLNITSLGLRSLKEISDGDVIISGNKNLCYANTINWKKLFGTSGQKTKIISNRGENSCKATGQVCHALCSPEGCWGPEPRDCVSCRNVSRGRECVDKCNLLEGEPREFVENSECIQCHPECLPQAMNITCTGRGPDNCIQCAHYIDGPHCVKTCPAGVMGENNTLVWKYADAGHVCHLCHPNCTYGCTGPGLEGCPTNGPKIPSIATGMVGALLLLLVVALGIGLFM

SEQ ID NO: 7406 - protein, 952 aa, Artificial Sequence
  source: /note="Description of Artificial Sequence: Synthetic Chimeric Antigen Receptor"
MLLLVTSLLLCELPHPAFLLIPQEQLVESGGRLVTPGGSLTLSCKASGFDFSAYYMSWVRQAPGKGLEWIATIYPSSGKTYYATWVNGRFTISSDNAQNTVDLQMNSLTAADRATYFCARDSYADDGALFNIWGPGTLVTISSGGGGSGGGGSGGGGSELVLTQSPSVSAALGSPAKITCTLSSAHKTDTIDWYQQLQGEAPRYLMQVQSDGSYTKRPGVPDRFSGSSSGADRYLIIPSVQADDEADYYCGADYIGGYVFGGGTQLTVTGESKYGPPCPPCPGQPREPQVYTLPPSQEEMTKNQVSLTCLVKGFYPSDIAVEWESNGQPENNYKTTPPVLDSDGSFFLYSRLTVDKSRWQEGNVFSCSVMHEALHNHYTQKSLSLSLGKMFWVLVVVGGVLACYSLLVTVAFIIFWVKRGRKKLLYIFKQPFMRPVQTTQEEDGCSCRFPEEEEGGCELRVKFSRSADAPAYQQGQNQLYNELNLGRREEYDVLDKRRGRDPEMGGKPRRKNPQEGLYNELQKDKMAEAYSEIGMKGERRRGKGHDGLYQGLSTATKDTYDALHMQALPPRLEGGGEGRGSLLTCGDVEENPGPRMLLLVTSLLLCELPHPAFLLIPRKVCNGIGIGEFKDSLSINATNIKHFKNCTSISGDLHILPVAFRGDSFTHTPPLDPQELDILKTVKEITGFLLIQAWPENRTDLHAFENLEIIRGRTKQHGQFSLAVVSLNITSLGLRSLKEISDGDVIISGNKNLCYANTINWKKLFGTSGQKTKIISNRGENSCKATGQVCHALCSPEGCWGPEPRDCVSCRNVSRGRECVDKCNLLEGEPREFVENSECIQCHPECLPQAMNITCTGRGPDNCIQCAHYIDGPHCVKTCPAGVMGENNTLVWKYADAGHVCHLCHPNCTYGCTGPGLEGCPTNGPKIPSIATGMVGALLLLLVVALGIGLFM

SEQ ID NO: 7407 - protein, 1062 aa, Artificial Sequence
  source: /note="Description of Artificial Sequence: Synthetic Chimeric Antigen Receptor"
MLLLVTSLLLCELPHPAFLLIPQEQLVESGGRLVTPGGSLTLSCKASGFDFSAYYMSWVRQAPGKGLEWIATIYPSSGKTYYATWVNGRFTISSDNAQNTVDLQMNSLTAADRATYFCARDSYADDGALFNIWGPGTLVTISSGGGGSGGGGSGGGGSELVLTQSPSVSAALGSPAKITCTLSSAHKTDTIDWYQQLQGEAPRYLMQVQSDGSYTKRPGVPDRFSGSSSGADRYLIIPSVQADDEADYYCGADYIGGYVFGGGTQLTVTGESKYGPPCPPCPAPEFLGGPSVFLFPPKPKDTLMISRTPEVTCVVVDVSQEDPEVQFNWYVDGVEVHNAKTKPREEQFNSTYRVVSVLTVLHQDWLNGKEYKCKVSNKGLPSSIEKTISKAKGQPREPQVYTLPPSQEEMTKNQVSLTCLVKGFYPSDIAVEWESNGQPENNYKTTPPVLDSDGSFFLYSRLTVDKSRWQEGNVFSCSVMHEALHNHYTQKSLSLSLGKMFWVLVVVGGVLACYSLLVTVAFIIFWVKRGRKKLLYIFKQPFMRPVQTTQEEDGCSCRFPEEEEGGCELRVKFSRSADAPAYQQGQNQLYNELNLGRREEYDVLDKRRGRDPEMGGKPRRKNPQEGLYNELQKDKMAEAYSEIGMKGERRRGKGHDGLYQGLSTATKDTYDALHMQALPPRLEGGGEGRGSLLTCGDVEENPGPRMLLLVTSLLLCELPHPAFLLIPRKVCNGIGIGEFKDSLSINATNIKHFKNCTSISGDLHILPVAFRGDSFTHTPPLDPQELDILKTVKEITGFLLIQAWPENRTDLHAFENLEIIRGRTKQHGQFSLAVVSLNITSLGLRSLKEISDGDVIISGNKNLCYANTINWKKLFGTSGQKTKIISNRGENSCKATGQVCHALCSPEGCWGPEPRDCVSCRNVSRGRECVDKCNLLEGEPREFVENSECIQCHPECLPQAMNITCTGRGPDNCIQCAHYIDGPHCVKTCPAGVMGENNTLVWKYADAGHVCHLCHPNCTYGCTGPGLEGCPTNGPKIPSIATGMVGALLLLLVVALGIGLFM

SEQ ID NO: 7408 - protein, 502 aa, Artificial Sequence
  source: /note="Description of Artificial Sequence: Synthetic Chimeric Antigen Receptor"
MALPVTALLLPLALLLHAARPEIVLTQSPGTLSLSPGERATLSCRASQSVSSSYLAWYQQKPGQAPRLLIYGASSRATGIPDRFSGSGSGTDFTLTISRLEPEDFAVYYCQQYGSSRFTFGPGTKVDIKGSTSGSGKPGSGEGSTKGQVQLVQSGAEVKKPGSSVKVSCKDSGGTFSSYAISWVRQAPGQGLEWMGGIIPIFGTTNYAQQFQGRVTITADESTSTAYMELSSLRSEDTAVYYCAREAVAADWLDPWGQGTLVTVSSFVPVFLPAKPTTTPAPRPPTPAPTIASQPLSLRPEACRPAAGGAVHTRGLDFACDIYIWAPLAGTCGVLLLSLVITLYCNHRNRSKRSRLLHSDYMNMTPRRPGPTRKHYQPYAPPRDFAAYRSRVKFSRSADAPAYQQGQNQLYNELNLGRREEYDVLDKRRGRDPEMGGKPRRKNPQEGLYNELQKDKMAEAYSEIGMKGERRRGKGHDGLYQGLSTATKDTYDALHMQALPPR

SEQ ID NO: 7409 - protein, 508 aa, Artificial Sequence
  source: /note="Description of Artificial Sequence: Synthetic Chimeric Antigen Receptor"
MALPVTALLLPLALLLHAARPEIVLTQSPGTLSLSPGERATLSCRASQSVSSSYLAWYQQKPGQAPRLLIYGASSRATGIPDRFSGSGSGTDFTLTISRLEPEDFAVYYCQQYGSSRFTFGPGTKVDIKGSTSGSGKPGSGEGSTKGQVQLVQSGAEVKKPGSSVKVSCKDSGGTFSSYAISWVRQAPGQGLEWMGGIIPIFGTTNYAQQFQGRVTITADESTSTAYMELSSLRSEDTAVYYCAREAVAADWLDPWGQGTLVTVSSFVPVFLPAKPTTTPAPRPPTPAPTIASQPLSLRPEACRPAAGGAVHTRGLDFACDIYIWAPLAGTCGVLLLSLVITLYCNHRNRFSVVKRGRKKLLYIFKQPFMRPVQTTQEEDGCSCRFPEEEEGGCELRVKFSRSADAPAYQQGQNQLYNELNLGRREEYDVLDKRRGRDPEMGGKPRRKNPQEGLYNELQKDKMAEAYSEIGMKGERRRGKGHDGLYQGLSTATKDTYDALHMQALPPR

SEQ ID NO: 7410 - protein, 509 aa, Artificial Sequence
  source: /note="Description of Artificial Sequence: Synthetic Chimeric Antigen Receptor"
MALPVTALLLPLALLLHAARPEIVLTQSPGTLSLSPGERATLSCRASQSVSSSYLAWYQQKPGQAPRLLIYGASSRATGIPDRFSGSGSGTDFTLTISRLEPEDFAVYYCQQYGSSRFTFGPGTKVDIKGSTSGSGKPGSGEGSTKGQVQLVQSGAEVKKPGSSVKVSCKDSGGTFSSYAISWVRQAPGQGLEWMGGIIPIFGTTNYAQQFQGRVTITADESTSTAYMELSSLRSEDTAVYYCAREAVAADWLDPWGQGTLVTVSSFVPVFLPAKPTTTPAPRPPTPAPTIASQPLSLRPEACRPAAGGAVHTRGLDFACDIYIWAPLAGTCGVLLLSLVITLYCNHRNQRRKYRSNKGESPVEPAEPCRYSCPREEEGSTIPIQEDYRKPEPACSPRVKFSRSADAPAYQQGQNQLYNELNLGRREEYDVLDKRRGRDPEMGGKPRRKNPQEGLYNELQKDKMAEAYSEIGMKGERRRGKGHDGLYQGLSTATKDTYDALHMQALPPR

SEQ ID NO: 7411 - protein, 550 aa, Artificial Sequence
  source: /note="Description of Artificial Sequence: Synthetic Chimeric Antigen Receptor"
MALPVTALLLPLALLLHAARPEIVLTQSPGTLSLSPGERATLSCRASQSVSSSYLAWYQQKPGQAPRLLIYGASSRATGIPDRFSGSGSGTDFTLTISRLEPEDFAVYYCQQYGSSRFTFGPGTKVDIKGSTSGSGKPGSGEGSTKGQVQLVQSGAEVKKPGSSVKVSCKDSGGTFSSYAISWVRQAPGQGLEWMGGIIPIFGTTNYAQQFQGRVTITADESTSTAYMELSSLRSEDTAVYYCAREAVAADWLDPWGQGTLVTVSSFVPVFLPAKPTTTPAPRPPTPAPTIASQPLSLRPEACRPAAGGAVHTRGLDFACDIYIWAPLAGTCGVLLLSLVITLYCNHRNRSKRSRLLHSDYMNMTPRRPGPTRKHYQPYAPPRDFAAYRSQRRKYRSNKGESPVEPAEPCRYSCPREEEGSTIPIQEDYRKPEPACSPRVKFSRSADAPAYQQGQNQLYNELNLGRREEYDVLDKRRGRDPEMGGKPRRKNPQEGLYNELQKDKMAEAYSEIGMKGERRRGKGHDGLYQGLSTATKDTYDALHMQALPPR

SEQ ID NO: 7412 - protein, 556 aa, Artificial Sequence
  source: /note="Description of Artificial Sequence: Synthetic Chimeric Antigen Receptor"
MALPVTALLLPLALLLHAARPEIVLTQSPGTLSLSPGERATLSCRASQSVSSSYLAWYQQKPGQAPRLLIYGASSRATGIPDRFSGSGSGTDFTLTISRLEPEDFAVYYCQQYGSSRFTFGPGTKVDIKGSTSGSGKPGSGEGSTKGQVQLVQSGAEVKKPGSSVKVSCKDSGGTFSSYAISWVRQAPGQGLEWMGGIIPIFGTTNYAQQFQGRVTITADESTSTAYMELSSLRSEDTAVYYCAREAVAADWLDPWGQGTLVTVSSFVPVFLPAKPTTTPAPRPPTPAPTIASQPLSLRPEACRPAAGGAVHTRGLDFACDIYIWAPLAGTCGVLLLSLVITLYCNHRNQRRKYRSNKGESPVEPAEPCRYSCPREEEGSTIPIQEDYRKPEPACSPRFSVVKRGRKKLLYIFKQPFMRPVQTTQEEDGCSCRFPEEEEGGCELRVKFSRSADAPAYQQGQNQLYNELNLGRREEYDVLDKRRGRDPEMGGKPRRKNPQEGLYNELQKDKMAEAYSEIGMKGERRRGKGHDGLYQGLSTATKDTYDALHMQALPPR

SEQ ID NO: 7413 - protein, 506 aa, Artificial Sequence
  source: /note="Description of Artificial Sequence: Synthetic Chimeric Antigen Receptor"
MLLLVTSLLLCELPHPAFLLIPDIQMTQTTSSLSASLGDRVTISCRASQDISKYLNWYQQKPDGTVKLLIYHTSRLHSGVPSRFSGSGSGTDYSLTISNLEQEDIATYFCQQGNTLPYTFGGGTKLEITGSTSGSGKPGSGEGSTKGEVKLQESGPGLVAPSQSLSVTCTVSGVSLPDYGVSWIRQPPRKGLEWLGVIWGSETTYYNSALKSRLTIIKDNSKSQVFLKMNSLQTDDTAIYYCAKHYYYGGSYAMDYWGQGTSVTVSSAAAFVPVFLPAKPTTTPAPRPPTPAPTIASQPLSLRPEACRPAAGGAVHTRGLDFACDIYIWAPLAGTCGVLLLSLVITLYCNHRNRSKRSRLLHSDYMNMTPRRPGPTRKHYQPYAPPRDFAAYRSRVKFSRSADAPAYQQGQNQLYNELNLGRREEYDVLDKRRGRDPEMGGKPRRKNPQEGLYNELQKDKMAEAYSEIGMKGERRRGKGHDGLYQGLSTATKDTYDALHMQALPPR

SEQ ID NO: 7414 - protein, 560 aa, Artificial Sequence
  source: /note="Description of Artificial Sequence: Synthetic Chimeric Antigen Receptor"
MLLLVTSLLLCELPHPAFLLIPDIQMTQTTSSLSASLGDRVTISCRASQDISKYLNWYQQKPDGTVKLLIYHTSRLHSGVPSRFSGSGSGTDYSLTISNLEQEDIATYFCQQGNTLPYTFGGGTKLEITGSTSGSGKPGSGEGSTKGEVKLQESGPGLVAPSQSLSVTCTVSGVSLPDYGVSWIRQPPRKGLEWLGVIWGSETTYYNSALKSRLTIIKDNSKSQVFLKMNSLQTDDTAIYYCAKHYYYGGSYAMDYWGQGTSVTVSSAAAFVPVFLPAKPTTTPAPRPPTPAPTIASQPLSLRPEACRPAAGGAVHTRGLDFACDIYIWAPLAGTCGVLLLSLVITLYCNHRNQRRKYRSNKGESPVEPAEPCRYSCPREEEGSTIPIQEDYRKPEPACSPRFSVVKRGRKKLLYIFKQPFMRPVQTTQEEDGCSCRFPEEEEGGCELRVKFSRSADAPAYQQGQNQLYNELNLGRREEYDVLDKRRGRDPEMGGKPRRKNPQEGLYNELQKDKMAEAYSEIGMKGERRRGKGHDGLYQGLSTATKDTYDALHMQALPPR

SEQ ID NO: 7415 - protein, 513 aa, Artificial Sequence
  source: /note="Description of Artificial Sequence: Synthetic Chimeric Antigen Receptor"
MLLLVTSLLLCELPHPAFLLIPDIQMTQTTSSLSASLGDRVTISCRASQDISKYLNWYQQKPDGTVKLLIYHTSRLHSGVPSRFSGSGSGTDYSLTISNLEQEDIATYFCQQGNTLPYTFGGGTKLEITGSTSGSGKPGSGEGSTKGEVKLQESGPGLVAPSQSLSVTCTVSGVSLPDYGVSWIRQPPRKGLEWLGVIWGSETTYYNSALKSRLTIIKDNSKSQVFLKMNSLQTDDTAIYYCAKHYYYGGSYAMDYWGQGTSVTVSSAAAFVPVFLPAKPTTTPAPRPPTPAPTIASQPLSLRPEACRPAAGGAVHTRGLDFACDIYIWAPLAGTCGVLLLSLVITLYCNHRNQRRKYRSNKGESPVEPAEPCRYSCPREEEGSTIPIQEDYRKPEPACSPRVKFSRSADAPAYQQGQNQLYNELNLGRREEYDVLDKRRGRDPEMGGKPRRKNPQEGLYNELQKDKMAEAYSEIGMKGERRRGKGHDGLYQGLSTATKDTYDALHMQALPPR

SEQ ID NO: 7416 - protein, 554 aa, Artificial Sequence
  source: /note="Description of Artificial Sequence: Synthetic Chimeric Antigen Receptor"
MLLLVTSLLLCELPHPAFLLIPDIQMTQTTSSLSASLGDRVTISCRASQDISKYLNWYQQKPDGTVKLLIYHTSRLHSGVPSRFSGSGSGTDYSLTISNLEQEDIATYFCQQGNTLPYTFGGGTKLEITGSTSGSGKPGSGEGSTKGEVKLQESGPGLVAPSQSLSVTCTVSGVSLPDYGVSWIRQPPRKGLEWLGVIWGSETTYYNSALKSRLTIIKDNSKSQVFLKMNSLQTDDTAIYYCAKHYYYGGSYAMDYWGQGTSVTVSSAAAFVPVFLPAKPTTTPAPRPPTPAPTIASQPLSLRPEACRPAAGGAVHTRGLDFACDIYIWAPLAGTCGVLLLSLVITLYCNHRNRSKRSRLLHSDYMNMTPRRPGPTRKHYQPYAPPRDFAAYRSQRRKYRSNKGESPVEPAEPCRYSCPREEEGSTIPIQEDYRKPEPACSPRVKFSRSADAPAYQQGQNQLYNELNLGRREEYDVLDKRRGRDPEMGGKPRRKNPQEGLYNELQKDKMAEAYSEIGMKGERRRGKGHDGLYQGLSTATKDTYDALHMQALPPR

SEQ ID NO: 7417 - protein, 476 aa, Artificial Sequence
  source: /note="Description of Artificial Sequence: Synthetic Chimeric Antigen Receptor"
MALPVTALLLPLALLLHAARPEIVLTQSPGTLSLSPGERATLSCRASQSVSSSYLAWYQQKPGQAPRLLIYGASSRATGIPDRFSGSGSGTDFTLTISRLEPEDFAVYYCQQYGSSRFTFGPGTKVDIKGSTSGSGKPGSGEGSTKGQVQLVQSGAEVKKPGSSVKVSCKDSGGTFSSYAISWVRQAPGQGLEWMGGIIPIFGTTNYAQQFQGRVTITADESTSTAYMELSSLRSEDTAVYYCAREAVAADWLDPWGQGTLVTVSSFVPVFLPAKPTTTPAPRPPTPAPTIASQPLSLRPEACRPAAGGAVHTRGLDFACDIYIWAPLAGTCGVLLLSLVITLYCNHRNRSKRSRLLHSDYMNMTPRRPGPTRKHYQPYAPPRDFAAYRSQRRKYRSNKGESPVEPAEPCRYSCPREEEGSTIPIQEDYRKPEPACSPQVRKAAITSYEKSDGVYTGLSTRNQETYETLKHEKPPQ

SEQ ID NO: 7418 - protein, 480 aa, Artificial Sequence
  source: /note="Description of Artificial Sequence: Synthetic Chimeric Antigen Receptor"
MLLLVTSLLLCELPHPAFLLIPDIQMTQTTSSLSASLGDRVTISCRASQDISKYLNWYQQKPDGTVKLLIYHTSRLHSGVPSRFSGSGSGTDYSLTISNLEQEDIATYFCQQGNTLPYTFGGGTKLEITGSTSGSGKPGSGEGSTKGEVKLQESGPGLVAPSQSLSVTCTVSGVSLPDYGVSWIRQPPRKGLEWLGVIWGSETTYYNSALKSRLTIIKDNSKSQVFLKMNSLQTDDTAIYYCAKHYYYGGSYAMDYWGQGTSVTVSSAAAFVPVFLPAKPTTTPAPRPPTPAPTIASQPLSLRPEACRPAAGGAVHTRGLDFACDIYIWAPLAGTCGVLLLSLVITLYCNHRNRSKRSRLLHSDYMNMTPRRPGPTRKHYQPYAPPRDFAAYRSQRRKYRSNKGESPVEPAEPCRYSCPREEEGSTIPIQEDYRKPEPACSPQVRKAAITSYEKSDGVYTGLSTRNQETYETLKHEKPPQ

SEQ ID NO: 7419 - protein, 428 aa, Artificial Sequence
  source: /note="Description of Artificial Sequence: Synthetic Chimeric Antigen Receptor"
MALPVTALLLPLALLLHAARPEIVLTQSPGTLSLSPGERATLSCRASQSVSSSYLAWYQQKPGQAPRLLIYGASSRATGIPDRFSGSGSGTDFTLTISRLEPEDFAVYYCQQYGSSRFTFGPGTKVDIKGSTSGSGKPGSGEGSTKGQVQLVQSGAEVKKPGSSVKVSCKDSGGTFSSYAISWVRQAPGQGLEWMGGIIPIFGTTNYAQQFQGRVTITADESTSTAYMELSSLRSEDTAVYYCAREAVAADWLDPWGQGTLVTVSSFVPVFLPAKPTTTPAPRPPTPAPTIASQPLSLRPEACRPAAGGAVHTRGLDFACDIYIWAPLAGTCGVLLLSLVITLYCNHRNRSKRSRLLHSDYMNMTPRRPGPTRKHYQPYAPPRDFAAYRSQVRKAAITSYEKSDGVYTGLSTRNQETYETLKHEKPPQ

SEQ ID NO: 7420 - protein, 432 aa, Artificial Sequence
  source: /note="Description of Artificial Sequence: Synthetic Chimeric Antigen Receptor"
MLLLVTSLLLCELPHPAFLLIPDIQMTQTTSSLSASLGDRVTISCRASQDISKYLNWYQQKPDGTVKLLIYHTSRLHSGVPSRFSGSGSGTDYSLTISNLEQEDIATYFCQQGNTLPYTFGGGTKLEITGSTSGSGKPGSGEGSTKGEVKLQESGPGLVAPSQSLSVTCTVSGVSLPDYGVSWIRQPPRKGLEWLGVIWGSETTYYNSALKSRLTIIKDNSKSQVFLKMNSLQTDDTAIYYCAKHYYYGGSYAMDYWGQGTSVTVSSAAAFVPVFLPAKPTTTPAPRPPTPAPTIASQPLSLRPEACRPAAGGAVHTRGLDFACDIYIWAPLAGTCGVLLLSLVITLYCNHRNRSKRSRLLHSDYMNMTPRRPGPTRKHYQPYAPPRDFAAYRSQVRKAAITSYEKSDGVYTGLSTRNQETYETLKHEKPPQ

SEQ ID NO: 7421 - protein, 486 aa, Artificial Sequence; identical to SEQ ID NO: 7332
  source: /note="Description of Artificial Sequence: Synthetic Chimeric Antigen Receptor"

SEQ ID NO: 7422 - protein, 486 aa, Artificial Sequence; identical to SEQ ID NO: 7374
  source: /note="Description of Artificial Sequence: Synthetic Chimeric Antigen Receptor"

SEQ ID NO: 7423 - protein, 486 aa, Artificial Sequence; identical to SEQ ID NO: 7375
  source: /note="Description of Artificial Sequence: Synthetic Chimeric Antigen Receptor"

SEQ ID NO: 7424 - protein, 486 aa, Artificial Sequence; identical to SEQ ID NO: 7376
  source: /note="Description of Artificial Sequence: Synthetic Chimeric Antigen Receptor"

SEQ ID NO: 7425 - protein, 491 aa, Artificial Sequence; identical to SEQ ID NO: 7377
  source: /note="Description of Artificial Sequence: Synthetic Chimeric Antigen Receptor"

SEQ ID NO: 7426 - protein, 491 aa, Artificial Sequence; identical to SEQ ID NO: 7378
  source: /note="Description of Artificial Sequence: Synthetic Chimeric Antigen Receptor"

SEQ ID NO: 7427 - protein, 491 aa, Artificial Sequence; identical to SEQ ID NO: 7379
  source: /note="Description of Artificial Sequence: Synthetic Chimeric Antigen Receptor"

SEQ ID NO: 7428 - protein, 491 aa, Artificial Sequence; identical to SEQ ID NO: 7380
  source: /note="Description of Artificial Sequence: Synthetic Chimeric Antigen Receptor"

SEQ ID NO: 7429 - protein, 491 aa, Artificial Sequence; identical to SEQ ID NO: 7381
  source: /note="Description of Artificial Sequence: Synthetic Chimeric Antigen Receptor"

SEQ ID NO: 7430 - protein, 491 aa, Artificial Sequence; identical to SEQ ID NO: 7381
  source: /note="Description of Artificial Sequence: Synthetic Chimeric Antigen Receptor"

SEQ ID NO: 7431 - protein, 491 aa, Artificial Sequence; identical to SEQ ID NO: 7383
  source: /note="Description of Artificial Sequence: Synthetic Chimeric Antigen Receptor"

SEQ ID NO: 7432 - protein, 486 aa, Artificial Sequence; identical to SEQ ID NO: 7384
  source: /note="Description of Artificial Sequence: Synthetic Chimeric Antigen Receptor"

SEQ ID NO: 7433 - protein, 486 aa, Artificial Sequence; identical to SEQ ID NO: 7333
  source: /note="Description of Artificial Sequence: Synthetic Chimeric Antigen Receptor"

SEQ ID NO: 7434 - protein, 486 aa, Artificial Sequence; identical to SEQ ID NO: 7332
  source: /note="Description of Artificial Sequence: Synthetic Chimeric Antigen Receptor"

SEQ ID NO: 7435 - protein, 486 aa, Artificial Sequence; identical to SEQ ID NO: 7374
  source: /note="Description of Artificial Sequence: Synthetic Chimeric Antigen Receptor"

SEQ ID NO: 7436 - protein, 486 aa, Artificial Sequence; identical to SEQ ID NO: 7375
  source: /note="Description of Artificial Sequence: Synthetic Chimeric Antigen Receptor"

SEQ ID NO: 7437 - protein, 486 aa, Artificial Sequence; identical to SEQ ID NO: 7376
  source: /note="Description of Artificial Sequence: Synthetic Chimeric Antigen Receptor"

SEQ ID NO: 7438 - protein, 491 aa, Artificial Sequence; identical to SEQ ID NO: 7377
  source: /note="Description of Artificial Sequence: Synthetic Chimeric Antigen Receptor"

SEQ ID NO: 7439 - protein, 491 aa, Artificial Sequence; identical to SEQ ID NO: 7378
  source: /note="Description of Artificial Sequence: Synthetic Chimeric Antigen Receptor"

SEQ ID NO: 7440 - protein, 491 aa, Artificial Sequence; identical to SEQ ID NO: 7379
  source: /note="Description of Artificial Sequence: Synthetic Chimeric Antigen Receptor"

SEQ ID NO: 7441 - protein, 491 aa, Artificial Sequence; identical to SEQ ID NO: 7380
  source: /note="Description of Artificial Sequence: Synthetic Chimeric Antigen Receptor"

SEQ ID NO: 7442 - protein, 491 aa, Artificial Sequence; identical to SEQ ID NO: 7381
  source: /note="Description of Artificial Sequence: Synthetic Chimeric Antigen Receptor"

SEQ ID NO: 7443 - protein, 491 aa, Artificial Sequence; identical to SEQ ID NO: 7381
  source: /note="Description of Artificial Sequence: Synthetic Chimeric Antigen Receptor"

SEQ ID NO: 7444 - protein, 491 aa, Artificial Sequence; identical to SEQ ID NO: 7383
  source: /note="Description of Artificial Sequence: Synthetic Chimeric Antigen Receptor"

SEQ ID NO: 7445 - protein, 486 aa, Artificial Sequence; identical to SEQ ID NO: 7384
  source: /note="Description of Artificial Sequence: Synthetic Chimeric Antigen Receptor"

SEQ ID NO: 7446 - protein, 527 aa, Artificial Sequence
  source: /note="Description of Artificial Sequence: Synthetic Chimeric Antigen Receptor"
DIQMTQTTSSLSASLGDRVTISCRASQDISKYLNWYQQKPDGTVKLLIYHTSRLHSGVPSRFSGSGSGTDYSLTISNLEQEDIATYFCQQGNTLPYTFGGGTKLEITGSTSGSGKPGSGEGSTKGEVKLQESGPGLVAPSQSLSVTCTVSGVSLPDYGVSWIRQPPRKGLEWLGVRWGSETTYYNSALKSRLTIIKDNSKSQVFLKMNSLQTDDTAIYYCAKHYYYGGSYAMDYWGQGTSVTVSSAAIEVMYPPPYLDNEKSNGTIIHVKGKHLCPSPLFPGPSKPFWVLVVVGGVLACYSLLVTVAFIIFWVRSKRSRLLHSDYMNMTPRRPGPTRKHYQPYAPPRDFAAYRSASGGGGSGGGGSKSRQTPPLASVEMEAMEALPVTWGTSSRDEDLENCSHHLGGGGSGGGGSRVKFSRSADAPAYQQGQNQLYNELNLGRREEYDVLDKRRGRDPEMGGKPRRKNPQEGLYNELQKDKMAEAYSEIGMKGERRRGKGHDGLYQGLSTATKDTYDALHMQALPPR

SEQ ID NO: 7447 - protein, 737 aa, Artificial Sequence
  source: /note="Description of Artificial Sequence: Synthetic Chimeric Antigen Receptor"
EIVMTQSPATLSLSPGERATLSCRASQDISKYLNWYQQKPGQAPRLLIYHTSRLHSGIPARFSGSGSGTDYTLTISSLQPEDFAVYFCQQGNTLPYTFGQGTKLEIKGGGGSGGGGSGGGGSQVQLQESGPGLVKPSETLSLTCTVSGVSLPDYGVSWIRQPPGKGLEWIGVIWGSETTYYQSSLKSRVTISKDNSKNQVSLKLSSVTAADTAVYYCAKHYYYGGSYAMDYWGQGTLVTVSSGGGGSGGGGSGGGGSGGGGSEVQLQQSGPGLVKPSQTLSLTCAISGDSVSSNSAAWNWIRQSPSRGLEWLGRTYYRSKWYNDYAVSVKSRITINPDTSKNQFSLQLNSVTPEDTAVYYCARDLGWIAVAGTFDYWGQGTLVTVSSGGGGSGGGGSGGGGSQSALTQPASVSGSPGQSITISCTGTSSDVGGYNYVSWYQQHPGKAPKLMIYDVSKRPSGVSNRFSGSKSGNTASLTISGLQAEDEADYYCSSYTSSSLNHVFGTGTKVTVLTTTTPAPRPPTPAPTIASQPLSLRPEACRPAAGGAVHTRGLDFACDIYIWAPLAGTCGVLLLSLVITLYCKRGRKKLLYIFKQPFMRPVQTTQEEDGCSCRFPEEEEGGCELRVKFSRSADAPAYKQGQNQLYNELNLGRREEYDVLDKRRGRDPEMGGKPRRKNPQEGLYNELQKDKMAEAYSEIGMKGERRRGKGHDGLYQGLSTATKDTYDALHMQALPPR

SEQ ID NO: 7448 - protein, 527 aa, Artificial Sequence; identical to SEQ ID NO: 7092
  source: /note="Description of Artificial Sequence: Synthetic Chimeric Antigen Receptor"

SEQ ID NO: 7449 - protein, 424 aa, Artificial Sequence; identical to SEQ ID NO: 6984
  source: /note="Description of Artificial Sequence: Synthetic Chimeric Antigen Receptor"

SEQ ID NO: 7450 - protein, 1090 aa, Artificial Sequence
  source: /note="Description of Artificial Sequence: Synthetic Chimeric Antigen Receptor"
MLLLVTSLLLCELPHPAFLLIPMTQTTSSLSASLGDRVTISCRASQDISKYLNWYQQKPDGTVKLLIYHTSRLHSGVPSRFSGSGSGTDYSLTISNLEQEDIATYFCQQGNTLPYTFGGGTKLEITGSTSGSGKPGSGEGSTKGEVKLQESGPGLVAPSQSLSVTCTVSGVSLPDYGVSWIRQPPRKGLEWLGVIWGSETTYYNSALKSRLTIIKDNSKSQVFLKMNSLQTDDTAIYYCAKHYYYGGSYAMDYWGQGTSVTVSSGGGGSEVQLQQSGAELVKPGASVKMSCKASGYTFTSYNMHWVKQTPGQGLEWIGAIYPGNGDTSYNQKFKGKATLTADKSSSTAYMQLSSLTSEDSADYYCARSNYYGSSYWFFDVWGAGTTVTVSSGSTSGGGSGGGSGGGGSSDIVLTQSPAILSASPGEKVTMTCRASSSVNYMDWYQKKPGSSPKPWIYATSNLASGVPARFSGSGSGTSYSLTISRVEAEDAATYYCQQWSFNPPTFGGGTKLEIKESKYGPPCPPCPMFWVLVVVGGVLACYSLLVTVAFIIFWVKRGRKKLLYIFKQPFMRPVQTTQEEDGCSCRFPEEEEGGCELRVKFSRSADAPAYQQGQNQLYNELNLGRREEYDVLDKRRGRDPEMGGKPRRKNPQEGLYNELQKDKMAEAYSEIGMKGERRRGKGHDGLYQGLSTATKDTYDALHMQALPPRLEGGGEGRGSLLTCGDVEENPGPRMLLLVTSLLLCELPHPAFLLIPRKVCNGIGIGEFKDSLSINATNIKHFKNCTSISGDLHILPVAFRGDSFTHTPPLDPQELDILKTVKEITGFLLIQAWPENRTDLHAFENLEIIRGRTKQHGQFSLAVVSLNITSLGLRSLKEISDGDVIISGNKNLCYANTINWKKLFGTSGQKTKIISNRGENSCKATGQVCHALCSPEGCWGPEPRDCVSCRNVSRGRECVDKCNLLEGEPREFVENSECIQCHPECLPQAMNITCTGRGPDNCIQCAHYIDGPHCVKTCPAGVMGENNTLVWKYADAGHVCHLCHPNCTYGCTGPGLEGCPTNGPKIPSIATGMVGALLLLLVVALGIGLFM

SEQ ID NO: 7451 - protein, 970 aa, Artificial Sequence
  source: /note="Description of Artificial Sequence: Synthetic Chimeric Antigen Receptor"
MLLLVTSLLLCELPHPAFLLIPDIQMTQTTSSLSASLGDRVTISCRASQDISKYLNWYQQKPDGTVKLLIYHTSRLHSGVPSRFSGSGSGTDYSLTISNLEQEDIATYFCQQGNTLPYTFGGGTKLEITGSTSGSGKPGSGEGSTKGEVKLQESGPGLVAPSQSLSVTCTVSGVSLPDYGVSWIRQPPRKGLEWLGVIWGSETTYYNSALKSRLTIIKDNSKSQVFLKMNSLQTDDTAIYYCAKHYYYGGSYAMDYWGQGTSVTVSSGGGGSEVQLQQSGAELVKPGASVKMSCKASGYTFTSYNMHWVKQTPGQGLEWIGAIYPGNGDTSYNQKFKGKATLTADKSSSTAYMQLSSLTSEDSADYYCARSNYYGSSYWFFDVWGAGTTVTVSSGSTSGGGSGGGSGGGGSSDIVLTQSPAILSASPGEKVTMTCRASSSVNYMDWYQKKPGSSPKPWIYATSNLASGVPARFSGSGSGTSYSLTISRVEAEDAATYYCQQWSFNPPTFGGGTKLEIKESKYGPPCPPCPAPEFLGGPSVFLFPPKPKDTLMISRTPEVTCVVVDVSQEDPEVQFNWYVDGVEVHNAKTKPREEQFNSTYRVVSVLTVLHQDWLNGKEYKCKVSNKGLPSSIEKTISKAKGQPREPQVYTLPPSQEEMTKNQVSLTCLVKGFYPSDIAVEWESNGQPENNYKTTPPVLDSDGSFFLYSRLTVDKSRWQEGNVFSCSVMHEALHNHYTQKSLSLSLGKMFWVLVVVGGVLACYSLLVTVAFIIFWVRSKRSRGGHSDYMNMTPRRPGPTRKHYQPYAPPRDFAAYRSKRGRKKLLYIFKQPFMRPVQTTQEEDGCSCRFPEEEEGGCELRVKFSRSADAPAYQQGQNQLYNELNLGRREEYDVLDKRRGRDPEMGGKPRRKNPQEGLYNELQKDKMAEAYSEIGMKGERRRGKGHDGLYQGLSTATKDTYDALHMQALPPR

SEQ ID NO: 7452 - protein, 1133 aa, Artificial Sequence
  source: /note="Description of Artificial Sequence: Synthetic Chimeric Antigen Receptor"
MLLLVTSLLLCELPHPAFLLIPDIQMTQTTSSLSASLGDRVTISCRASQDISKYLNWYQQKPDGTVKLLIYHTSRLHSGVPSRFSGSGSGTDYSLTISNLEQEDIATYFCQQGNTLPYTFGGGTKLEITGSTSGSGKPGSGEGSTKGEVKLQESGPGLVAPSQSLSVTCTVSGVSLPDYGVSWIRQPPRKGLEWLGVIWGSETTYYNSALKSRLTIIKDNSKSQVFLKMNSLQTDDTAIYYCAKHYYYGGSYAMDYWGQGTSVTVSSGGGGSEVQLQQSGAELVKPGASVKMSCKASGYTFTSYNMHWVKQTPGQGLEWIGAIYPGNGDTSYNQKFKGKATLTADKSSSTAYMQLSSLTSEDSADYYCARSNYYGSSYWFFDVWGAGTTVTVSSGSTSGGGSGGGSGGGGSSDIVLTQSPAILSASPGEKVTMTCRASSSVNYMDWYQKKPGSSPKPWIYATSNLASGVPARFSGSGSGTSYSLTISRVEAEDAATYYCQQWSFNPPTFGGGTKLEIKESKYGPPCPPCPKPTTTPAPRPPTPAPTIASQPLSLRPEACRPAAGGAVHTRGLDFACDIYIWAPLAGTCGVLLLSLVITKRGRKKLLYIFKQPFMRPVQTTQEEDGCSCRFPEEEEGGCELRVKFSRSADAPAYQQGQNQLYNELNLGRREEYDVLDKRRGRDPEMGGKPRRKNPQEGLYNELQKDKMAEAYSEIGMKGERRRGKGHDGLYQGLSTATKDTYDALHMQALPPRLEGGGEGRGSLLTCGDVEENPGPRMLLLVTSLLLCELPHPAFLLIPRKVCNGIGIGEFKDSLSINATNIKHFKNCTSISGDLHILPVAFRGDSFTHTPPLDPQELDILKTVKEITGFLLIQAWPENRTDLHAFENLEIIRGRTKQHGQFSLAVVSLNITSLGLRSLKEISDGDVIISGNKNLCYANTINWKKLFGTSGQKTKIISNRGENSCKATGQVCHALCSPEGCWGPEPRDCVSCRNVSRGRECVDKCNLLEGEPREFVENSECIQCHPECLPQAMNITCTGRGPDNCIQCAHYIDGPHCVKTCPAGVMGENNTLVWKYADAGHVCHLCHPNCTYGCTGPGLEGCPTNGPKIPSIATGMVGALLLLLVVALGIGLFM

SEQ ID NO: 7453 - protein, 727 aa, Artificial Sequence
  source: /note="Description of Artificial Sequence: Synthetic Chimeric Antigen Receptor"
MVLLVTSLLLCELPHPAFLLIPDTEVQLVESGGGLVKPGGSLKLSCAASGFAFSIYDMSWVRQTPEKRLEWVAYISSGGGTYYPDTVKGRFTISRDNAKNTLYLQMSSLKSEDTAMYYCARHSGYGTHWGVLFAYWGQGTLVTVSAGGGGSGGGGSGGGGSDIQMTQTTSSLSASLGDRVTISCRASQDISNYLNWYQQKPDGTVKLLIYYTSILHSGVPSRFSGSGSGTDYSLTISNLEQEDFATYFCQQGNTLPWTFGGGTKLEIKAEPKSCDKTHTCPPCPAPELLGGPSVFLFPPKPKDTLMISRTPEVTCVVVDVSHEDPEVKFNWYVDGVEVHNAKTKPREEQYNSTYRVVSVLTVLHQDWLNGKEYKCKVSNKALPAPIEKTISKAKGQPREPQVYTLPPSRDELTKNQVSLTCLVKGFYPSDIAVEWESNGQPENNYKTTPPVLDSDGSFFLYSKLTVDKSRWQQGNVFSCSVMHEALHNHYTQKSLSLSPGKKDPKAAAIEVMYPPPYLDNEKSNGTIIHVKGKHLCPSPLFPGPSKPFWVLVVVGGVLACYSLLVTVAFIIFWVRSKRSRLLHSDYMNMTPRRPGPTRKHYQPYAPPRDFAAYRSRVKFSRSADAPAYQQGQNQLYNELNLGRREEYDVLDKRRGRDPEMGGKPRRKNPQEGLYNELQKDKMAEAYSEIGMKGERRRGKGHDGLYQGLSTATKDTYDALHMQALPPR

SEQ ID NO: 7454 - protein, 529 aa, Artificial Sequence
  source: /note="Description of Artificial Sequence: Synthetic Chimeric Antigen Receptor"
MALPVTALLLPLALLLHAARPDIVMTQSPATLSVTPGDRVSLSCRASQSISDYLHWYQQKSHESPRLLIKYASQSISGIPSRFSGSGSGSDFTLSINSVEPEDVGVYYCQNGHSFPLTFGAGTKLELRRGGGGSGGGGSGGGGSQVQLQQPGTELVRPGSSVKLSCKASGYTFTSYWVNWVKQRPDQGLEWIGRIDPYDSETHYNQKFTDKAISTIDTSSNTAYMQLSTLTSDASAVYYCSRSPRDSSTNLADWGQGTLVTVSSTTTPAPRPPTPAPTIASQPLSLRPEACRPAAGGAVHTRGLDFACDIYIWAPLAGTCGVLLLSLVITLYCRSKRSRLLHSDYMNMTPRRPGPTRKHYQPYAPPRDFAAYRSKRGRKKLLYIFKQPFMRPVQTTQEEDGCSCRFPEEEEGGCELRVKFSRSADAPAYQQGQNQLYNELNLGRREEYDVLDKRRGRDPEMGGKPQRRKNPQEGLYNELQKDKMAEAYSEIGMKGERRRGKGHDGLYQGLSTATKDTYDALHMQALPPR

SEQ ID NO: 7455 - protein, 266 aa, Artificial Sequence
  source: /note="Description of Artificial Sequence: Synthetic Chimeric Antigen Receptor"
METDTLLLWVLLLWVPGSTGDIVLTQSPAILSASPGEKVTMTCRASSSVNYMDWYQKKPGSSPKPWIYATSNLASGVPARFSGSGSGTSYSLTISRVEAEDAATYYCQQWSFNPPTFGGGTKLEIKGSTSGGGSGGGSGGGGSSEVQLQQSGAELVKPGASVKMSCKASGYTFTSYNMHWVKQTPGQGLEWIGAIYPGNGDTSYNQKFKGKATLTADKSSSTAYMQLSSLTSEDSADYYCARSNYYGSSYWFFDVWGAGTTVTVSS

SEQ ID NO: 7456 - protein, 389 aa, Artificial Sequence
  source: /note="Description of Artificial Sequence: Synthetic Chimeric Antigen Receptor"
MALPVTALLLPLALLLHAARPGSGSGAQAAEVQLVESGGGLVQPGRSLRLSCAASGFTFNDYAMHWVRQAPGKGLEWVSTISWNSGSIGYADSVKGRFTISRDNAKKSLYLQMNSLRAEDTALYYCAKDIQYGNYYYGMDVWGQGTTVTVSSGGGGSGGGGSGGGGSEIVLTQSPATLSLSPGERATLSCRASQSVSSYLAWYQQKPGQAPRLLIYDASNRATGIPARFSGSGSGTDFTLTISSLEPEDFAVYYCQQRSNWPITFGQGTRLEIKRSDPASGAGSGSGSAIELLPVPGAKKSAKLYIPYIILTIIILTIVGFIWLLKVNGCRKYKLNKTESTPVVEEDEMQPYASYTEKNNPLYDTTNKVKASEALQSEVDTDLHTLSHG

SEQ ID NO: 7457 - protein, 428 aa, Artificial Sequence
  source: /note="Description of Artificial Sequence: Synthetic Chimeric Antigen Receptor"
MALPVTALLLPLALLLHAARPGSGSGAQAAEVQLVESGGGLVQPGRSLRLSCAASGFTFNDYAMHWVRQAPGKGLEWVSTISWNSGSIGYADSVKGRFTISRDNAKKSLYLQMNSLRAEDTALYYCAKDIQYGNYYYGMDVWGQGTTVTVSSGGGGSGGGGSGGGGSEIVLTQSPATLSLSPGERATLSCRASQSVSSYLAWYQQKPGQAPRLLIYDASNRATGIPARFSGSGSGTDFTLTISSLEPEDFAVYYCQQRSNWPITFGQGTRLEIKRSDPASGAGSGSGSALNVTYVPQNPTTGIFPGDGSGKQETRAGVVHGAIGGAGVTALLALCLCLIFFIVKTHRRKAARTAVGRNDTHPTTGSASPKHQKKSKLHGPTETSSCSGAAPTVEMDEELHYASLNFHGMNPSKDTSTEYSEVRTQSHG

SEQ ID NO: 7458 - protein, 389 aa, Artificial Sequence
  source: /note="Description of Artificial Sequence: Synthetic Chimeric Antigen Receptor"
MALPVTALLLPLALLLHAARPGSGSGAQAAEVQLVESGGGLVQPGRSLRLSCAASGFTFNDYAMHWVRQAPGKGLEWVSTISWNSGSIGYADSVKGRFTISRDNAKKSLYLQMNSLRAEDTALYYCAKDIQYGNYYYGMDVWGQGTTVTVSSGGGGSGGGGSGGGGSEIVLTQSPATLSLSPGERATLSCRASQSVSSYLAWYQQKPGQAPRLLIYDASNRATGIPARFSGSGSGTDFTLTISSLEPEDFAVYYCQQRSNWPITFGQGTRLEIKRSDPASGAGSGSGSAVQAPSSSPMGIIVAVVTGIAVAAIVAAVVALIYCRKKRISALPGYPECREMGETLPEKPANPTNPDEADKVGAENTITYSLLMHPDALEEPDDQNRISHG

SEQ ID NO: 7459 - protein, 430 aa, Artificial Sequence
  source: /note="Description of Artificial Sequence: Synthetic Chimeric Antigen Receptor"
MALPVTALLLPLALLLHAARPGSGSGAQAAEVQLVESGGGLVQPGRSLRLSCAASGFTFNDYAMHWVRQAPGKGLEWVSTISWNSGSIGYADSVKGRFTISRDNAKKSLYLQMNSLRAEDTALYYCAKDIQYGNYYYGMDVWGQGTTVTVSSGGGGSGGGGSGGGGSEIVLTQSPATLSLSPGERATLSCRASQSVSSYLAWYQQKPGQAPRLLIYDASNRATGIPARFSGSGSGTDFTLTISSLEPEDFAVYYCQQRSNWPITFGQGTRLEIKRSDPASGAGSGSGSALNFTVPTGARSNHLTSGVIEGLLSTLGPATVALLFCYGLKRKIGRRSARDPLRSLPSPLPQEFTYLNSPTPGQLQPIYENVNVVSGDEVYSLAYYNQPEQESVAAETLGTHMEDKVSLDIYSRLRKANITDVDYEDAMSHG

SEQ ID NO: 7460 - protein, 413 aa, Artificial Sequence
  source: /note="Description of Artificial Sequence: Synthetic Chimeric Antigen Receptor"
MALPVTALLLPLALLLHAARPGSGSGAQAAEVQLVESGGGLVQPGRSLRLSCAASGFTFNDYAMHWVRQAPGKGLEWVSTISWNSGSIGYADSVKGRFTISRDNAKKSLYLQMNSLRAEDTALYYCAKDIQYGNYYYGMDVWGQGTTVTVSSGGGGSGGGGSGGGGSEIVLTQSPATLSLSPGERATLSCRASQSVSSYLAWYQQKPGQAPRLLIYDASNRATGIPARFSGSGSGTDFTLTISSLEPEDFAVYYCQQRSNWPITFGQGTRLEIKRSDPASGAGSGSGSAGPDGYRRDLMTAGVLWGLFGVLGFTGVALLLYALFHKISGESSATNEPRGASRPNPQEFTYSSPTPDMEELQPVYVNVGSVDVDVVYSQVWSMQQPESSANIRTLLENKDSQVIYSSVKKSSHG

SEQ ID NO: 7461 - protein, 463 aa, Artificial Sequence
  source: /note="Description of Artificial Sequence: Synthetic Chimeric Antigen Receptor"
MALPVTALLLPLALLLHAARPGSGSGAQAAEVQLVESGGGLVQPGRSLRLSCAASGFTFNDYAMHWVRQAPGKGLEWVSTISWNSGSIGYADSVKGRFTISRDNAKKSLYLQMNSLRAEDTALYYCAKDIQYGNYYYGMDVWGQGTTVTVSSGGGGSGGGGSGGGGSEIVLTQSPATLSLSPGERATLSCRASQSVSSYLAWYQQKPGQAPRLLIYDASNRATGIPARFSGSGSGTDFTLTISSLEPEDFAVYYCQQRSNWPITFGQGTRLEIKRSDPASGAGSGSGSAGTSRNRTGLTAAGITGLVLSILVLAAAAALLHYARARRKPGGLSATGTSSHSPSECQEPSSSRPSRIDPQEPTHSKPLAPMELEPMYSNANPGDSNPIYSQIWSIQHTKENSANCPMMHQEHEELTVLYSELKKTHPDDSAGEASSRGRAHEEDDEENYENVPRVLLASDHSHG

SEQ ID NO: 7462 - protein, 433 aa, Artificial Sequence
  source: /note="Description of Artificial Sequence: Synthetic Chimeric Antigen Receptor"
MALPVTALLLPLALLLHAARPGSGSGAQAAEVQLVESGGGLVQPGRSLRLSCAASGFTFNDYAMHWVRQAPGKGLEWVSTISWNSGSIGYADSVKGRFTISRDNAKKSLYLQMNSLRAEDTALYYCAKDIQYGNYYYGMDVWGQGTTVTVSSGGGGSGGGGSGGGGSEIVLTQSPATLSLSPGERATLSCRASQSVSSYLAWYQQKPGQAPRLLIYDASNRATGIPARFSGSGSGTDFTLTISSLEPEDFAVYYCQQRSNWPITFGQGTRLEIKRSDPASGAGSGSGSAVTVRETPGNRDGLVAAGATGGLLSALLLAVALLFHCWRRRKSGVGFLGDETRLPPAPGPGESSHSICPAQVELQSLYVDVHPKKGDLVYSEIQTTQLGEEEEANTSRTLLEDKDVSVVYSEVKTQHPDNSAGKISSKDEESSHG

SEQ ID NO: 7463 - protein, 435 aa, Artificial Sequence
  source: /note="Description of Artificial Sequence: Synthetic Chimeric Antigen Receptor"
MALPVTALLLPLALLLHAARPGSGSGAQAAEVQLVESGGGLVQPGRSLRLSCAASGFTFNDYAMHWVRQAPGKGLEWVSTISWNSGSIGYADSVKGRFTISRDNAKKSLYLQMNSLRAEDTALYYCAKDIQYGNYYYGMDVWGQGTTVTVSSGGGGSGGGGSGGGGSEIVLTQSPATLSLSPGERATLSCRASQSVSSYLAWYQQKPGQAPRLLIYDASNRATGIPARFSGSGSGTDFTLTISSLEPEDFAVYYCQQRSNWPITFGQGTRLEIKRSDPASGAGSGSGSALYITGLTANRSGPFATGVAGGLLSIAGLAAGALLLYCWLSRKAGRKPASDPARSPPDSDSQEPTYHNVPAWEELQPVYTNANPRGENVVYSEVRIIQEKKKHAVASDPRHLRNKGSPIIYSEVKVASTPVSGSLFLASSAPHRSHG

SEQ ID NO: 7464 - protein, 435 aa, Artificial Sequence
  source: /note="Description of Artificial Sequence: Synthetic Chimeric Antigen Receptor"
MALPVTALLLPLALLLHAARPGSGSGAQAAEVQLVESGGGLVQPGRSLRLSCAASGFTFNDYAMHWVRQAPGKGLEWVSTISWNSGSIGYADSVKGRFTISRDNAKKSLYLQMNSLRAEDTALYYCAKDIQYGNYYYGMDVWGQGTTVTVSSGGGGSGGGGSGGGGSEIVLTQSPATLSLSPGERATLSCRASQSVSSYLAWYQQKPGQAPRLLIYDASNRATGIPARFSGSGSGTDFTLTISSLEPEDFAVYYCQQRSNWPITFGQGTRLEIKRSDPASGAGSGSGSAPYEWSNSSDPLLVSVIGNPSNSWPSPTEPSSKTGNPRHLHILIGTSVVIILFILLFFLLHRWCSNKKNAAVMDQESAGNRTANSEDSDEQDPQEVTYTQLNHCVFTQRKITRPSQRPKTPPTDIIVYAELPNAESRSKVVSCPSHG

SEQ ID NO: 7465 - protein, 428 aa, Artificial Sequence
  source: /note="Description of Artificial Sequence: Synthetic Chimeric Antigen Receptor"
MALPVTALLLPLALLLHAARPGSGSGAQAAEVQLVESGGGLVQPGRSLRLSCAASGFTFNDYAMHWVRQAPGKGLEWVSTISWNSGSIGYADSVKGRFTISRDNAKKSLYLQMNSLRAEDTALYYCAKDIQYGNYYYGMDVWGQGTTVTVSSGGGGSGGGGSGGGGSEIVLTQSPATLSLSPGERATLSCRASQSVSSYLAWYQQKPGQAPRLLIYDASNRATGIPARFSGSGSGTDFTLTISSLEPEDFAVYYCQQRSNWPITFGQGTRLEIKRSDPASGAGSGSGSAPYEWSNSSDPLLVSVTGNPSNSWPSPTEPSSETGNPRHLHVLIGTSVVIILFILLLFFLLHRWCCNKKNAVVMDQEPAGNRTVNREDSDEQDPQEVTYAQLNHCVFTQRKITRPSQRPKTPPTDIIVYTELPNAEPSHG

SEQ ID NO: 7466 - protein, 467 aa, Artificial Sequence
  source: /note="Description of Artificial Sequence: Synthetic Chimeric Antigen Receptor"
MALPVTALLLPLALLLHAARPGSGSGAQAAEVQLVESGGGLVQPGRSLRLSCAASGFTFNDYAMHWVRQAPGKGLEWVSTISWNSGSIGYADSVKGRFTISRDNAKKSLYLQMNSLRAEDTALYYCAKDIQYGNYYYGMDVWGQGTTVTVSSGGGGSGGGGSGGGGSEIVLTQSPATLSLSPGERATLSCRASQSVSSYLAWYQQKPGQAPRLLIYDASNRATGIPARFSGSGSGTDFTLTISSLEPEDFAVYYCQQRSNWPITFGQGTRLEIKRSDPASGAGSGSGSAPYEWSDASDPLPVSVTGNPSSSWPSPTEPSFKTGIARHLHAVIRYSVAIILFTILPFFLLHRWCSKKKDAAVMNQEPAGHRTVNREDSDEQDPQEVTYAQLDHCIFTQRKITGPSQRSKRPSTDTSVCIELPNAEPRALSPAHEHHSQALMGSSRETTALSQTQLASSHVPAAGISHG

SEQ ID NO: 7467 - protein, 467 aa, Artificial Sequence
  source: /note="Description of Artificial Sequence: Synthetic Chimeric Antigen Receptor"
MALPVTALLLPLALLLHAARPGSGSGAQAAEVQLVESGGGLVQPGRSLRLSCAASGFTFNDYAMHWVRQAPGKGLEWVSTISWNSGSIGYADSVKGRFTISRDNAKKSLYLQMNSLRAEDTALYYCAKDIQYGNYYYGMDVWGQGTTVTVSSGGGGSGGGGSGGGGSEIVLTQSPATLSLSPGERATLSCRASQSVSSYLAWYQQKPGQAPRLLIYDASNRATGIPARFSGSGSGTDFTLTISSLEPEDFAVYYCQQRSNWPITFGQGTRLEIKRSDPASGAGSGSGSAPYEWSDPSDPLLVSVTGNSSSSSSSPTEPSSKTGIRRHLHILIGTSVAIILFIILFFFLLHCCCSNKKNAAVMDQEPAGDRTVNREDSDDQDPQEVTYAQLDHCVFTQTKITSPSQRPKTPPTDTTMYMELPNAKPRSLSPAHKHHSQALRGSSRETTALSQNRVASSHVPAAGISHG

SEQ ID NO: 7468 - protein, 436 aa, Artificial Sequence
  source: /note="Description of Artificial Sequence: Synthetic Chimeric Antigen Receptor"
MALPVTALLLPLALLLHAARPGSGSGAQAAEVQLVESGGGLVQPGRSLRLSCAASGFTFNDYAMHWVRQAPGKGLEWVSTISWNSGSIGYADSVKGRFTISRDNAKKSLYLQMNSLRAEDTALYYCAKDIQYGNYYYGMDVWGQGTTVTVSSGGGGSGGGGSGGGGSEIVLTQSPATLSLSPGERATLSCRASQSVSSYLAWYQQKPGQAPRLLIYDASNRATGIPARFSGSGSGTDFTLTISSLEPEDFAVYYCQQRSNWPITFGQGTRLEIKRSDPASGAGSGSGSAPYEWSDPSDPLLVSVTGNPSSSWPSPTEPSSKSGNPRHLHILIGTSVVIILFILLLFFLLHLWCSNKKNAAVMDQEPAGNRTANSEDSDEQDPEEVTYAQLDHCVFTQRKITRPSQRPKTPPTDTILYTELPNAKPRSKVVSCPSHG

SEQ ID NO: 7469 - protein, 447 aa, Artificial Sequence
  source: /note="Description of Artificial Sequence: Synthetic Chimeric Antigen Receptor"
MALPVTALLLPLALLLHAARPGSGSGAQAAEVQLVESGGGLVQPGRSLRLSCAASGFTFNDYAMHWVRQAPGKGLEWVSTISWNSGSIGYADSVKGRFTISRDNAKKSLYLQMNSLRAEDTALYYCAKDIQYGNYYYGMDVWGQGTTVTVSSGGGGSGGGGSGGGGSEIVLTQSPATLSLSPGERATLSCRASQSVSSYLAWYQQKPGQAPRLLIYDASNRATGIPARFSGSGSGTDFTLTISSLEPEDFAVYYCQQRSNWPITFGQGTRLEIKRSDPASGAGSGSGSAPCVWSNSSDPLLVSVTGNPSSSWPSPTEPSSKSGICRHLHVLIGTSVVIFLFILLLFFLLYRWCSNKKNAAVMDQEPAGDRTVNRQDSDEQDPQEVTYAQLDHCVFIQRKISRPSQRPKTPLTDTSVYTELPNAEPRSKVVSCPRAPQSGLEGVFSHG

SEQ ID NO: 7470 - protein, 407 aa, Artificial Sequence
  source: /note="Description of Artificial Sequence: Synthetic Chimeric Antigen Receptor"
MALPVTALLLPLALLLHAARPGSGSGAQAAEVQLVESGGGLVQPGRSLRLSCAASGFTFNDYAMHWVRQAPGKGLEWVSTISWNSGSIGYADSVKGRFTISRDNAKKSLYLQMNSLRAEDTALYYCAKDIQYGNYYYGMDVWGQGTTVTVSSGGGGSGGGGSGGGGSEIVLTQSPATLSLSPGERATLSCRASQSVSSYLAWYQQKPGQAPRLLIYDASNRATGIPARFSGSGSGTDFTLTISSLEPEDFAVYYCQQRSNWPITFGQGTRLEIKRSDPASGAGSGSGSASFRALPHAWSDPSDPLPVSVTGNSRYLHALIGTSVVIIPFAILLFFLLHRWCANKKNAVVMDQEPAGNRTVNREDSDEQDPQEVTYAQLNHCVFTQRKITRPSQRPKTPPTDTSVSHG

SEQ ID NO: 7471 - protein, 471 aa, Artificial Sequence
  source: /note="Description of Artificial Sequence: Synthetic Chimeric Antigen Receptor"
MALPVTALLLPLALLLHAARPGSGSGAQAAEVQLVESGGGLVQPGRSLRLSCAASGFTFNDYAMHWVRQAPGKGLEWVSTISWNSGSIGYADSVKGRFTISRDNAKKSLYLQMNSLRAEDTALYYCAKDIQYGNYYYGMDVWGQGTTVTVSSGGGGSGGGGSGGGGSEIVLTQSPATLSLSPGERATLSCRASQSVSSYLAWYQQKPGQAPRLLIYDASNRATGIPARFSGSGSGTDFTLTISSLEPEDFAVYYCQQRSNWPITFGQGTRLEIKRSDPASGAGSGSGSAGPSMGSSPPPTGPISTPAGPEDQPLTPTGSDPQSGLGRHLGVVIGILVAVVLLLLLLLLLFLILRHRRQGKHWTSTQRKADFQHPAGAVGPEPTDRGLQWRSSPAADAQEENLYAAVKDTQPEDGVEMDTRAAASEAPQDVTYAQLHSLTLRRKATEPPPSQEREPPAEPSIYATLAIHSHG

SEQ ID NO: 7472 - protein, 504 aa, Artificial Sequence
  source: /note="Description of Artificial Sequence: Synthetic Chimeric Antigen Receptor"
MALPVTALLLPLALLLHAARPGSGSGAQAAEVQLVESGGGLVQPGRSLRLSCAASGFTFNDYAMHWVRQAPGKGLEWVSTISWNSGSIGYADSVKGRFTISRDNAKKSLYLQMNSLRAEDTALYYCAKDIQYGNYYYGMDVWGQGTTVTVSSGGGGSGGGGSGGGGSEIVLTQSPATLSLSPGERATLSCRASQSVSSYLAWYQQKPGQAPRLLIYDASNRATGIPARFSGSGSGTDFTLTISSLEPEDFAVYYCQQRSNWPITFGQGTRLEIKRSDPASGAGSGSGSAGHSGGSSLPPTGPPSTPGLGRYLEVLIGVSVAFVLLLFLLLFLLLRRQRHSKHRTSDQRKTDFQRPAGAAETEPKDRGLLRRSSPAADVQEENLYAAVKDTQSEDRVELDSQSPHDEDPQAVTYAPVKHSSPRREMASPPSSLSGEFLDTKDRQVEEDRQMDTEAAASEASQDVTYAQLHSLTLRRKATEPPPSQEGEPPAEPSIYATLAIHSHG

SEQ ID NO: 7473 - protein, 522 aa, Artificial Sequence
  source: /note="Description of Artificial Sequence: Synthetic Chimeric Antigen Receptor"
MALPVTALLLPLALLLHAARPGSGSGAQAAEVQLVESGGGLVQPGRSLRLSCAASGFTFNDYAMHWVRQAPGKGLEWVSTISWNSGSIGYADSVKGRFTISRDNAKKSLYLQMNSLRAEDTALYYCAKDIQYGNYYYGMDVWGQGTTVTVSSGGGGSGGGGSGGGGSEIVLTQSPATLSLSPGERATLSCRASQSVSSYLAWYQQKPGQAPRLLIYDASNRATGIPARFSGSGSGTDFTLTISSLEPEDFAVYYCQQRSNWPITFGQGTRLEIKRSDPASGAGSGSGSAGSLEGPRPSPTRSVSTAAGPEDQPLMPTGSVPHSGLRRHWEVLIGVLVVSILLLSLLLFLLLQHWRQGKHRTLAQRQADFQRPPGAAEPEPKDGGLQRRSSPAADVQGENFCAAVKNTQPEDGVEMDTRQSPHDEDPQAVTYAKVKHSRPRREMASPPSPLSGEFLDTKDRQAEEDRQMDTEAAASEAPQDVTYAQLHSFTLRQKATEPPPSQEGASPAEPSVYATLAIHSHG

SEQ ID NO: 7474 - protein, 464 aa, Artificial Sequence
  source: /note="Description of Artificial Sequence: Synthetic Chimeric Antigen Receptor"
MALPVTALLLPLALLLHAARPGSGSGAQAAEVQLVESGGGLVQPGRSLRLSCAASGFTFNDYAMHWVRQAPGKGLEWVSTISWNSGSIGYADSVKGRFTISRDNAKKSLYLQMNSLRAEDTALYYCAKDIQYGNYYYGMDVWGQGTTVTVSSGGGGSGGGGSGGGGSEIVLTQSPATLSLSPGERATLSCRASQSVSSYLAWYQQKPGQAPRLLIYDASNRATGIPARFSGSGSGTDFTLTISSLEPEDFAVYYCQQRSNWPITFGQGTRLEIKRSDPASGAGSGSGSAGPSGDPSLSPTGSTPTPGPEDQPLTPTGLDPQSGLGRHLGVVTGVSVAFVLLLFLLLFLLLRHRHQSKHRTSAHFYRPAGAAGPEPKDQGLQKRASPVADIQEEILNAAVKDTQPKDGVEMDARAAASEAPQDVTYAQLHSLTLRREATEPPPSQEREPPAEPSIYAPLAIHSHG

SEQ ID NO: 7475 - protein, 422 aa, Artificial Sequence
  source: /note="Description of Artificial Sequence: Synthetic Chimeric Antigen Receptor"
MALPVTALLLPLALLLHAARPGSGSGAQAAEVQLVESGGGLVQPGRSLRLSCAASGFTFNDYAMHWVRQAPGKGLEWVSTISWNSGSIGYADSVKGRFTISRDNAKKSLYLQMNSLRAEDTALYYCAKDIQYGNYYYGMDVWGQGTTVTVSSGGGGSGGGGSGGGGSEIVLTQSPATLSLSPGERATLSCRASQSVSSYLAWYQQKPGQAPRLLIYDASNRATGIPARFSGSGSGTDFTLTISSLEPEDFAVYYCQQRSNWPITFGQGTRLEIKRSDPASGAGSGSGSAMPSTGGDSCPFCLKLLLPGLLLLLVVIILILAFWVLPKYKTRKAMRNNVPRDRGDTAMEVGIYANILEKQAKEESVPEVGSRPCVSTAQDEAKHSQELQYATPVFQEVAPREQEACDSYKSGYVYSELNFSHG

SEQ ID NO: 7476 - protein, 415 aa, Artificial Sequence
  source: /note="Description of Artificial Sequence: Synthetic Chimeric Antigen Receptor"
MALPVTALLLPLALLLHAARPGSGSGAQAAEVQLVESGGGLVQPGRSLRLSCAASGFTFNDYAMHWVRQAPGKGLEWVSTISWNSGSIGYADSVKGRFTISRDNAKKSLYLQMNSLRAEDTALYYCAKDIQYGNYYYGMDVWGQGTTVTVSSGGGGSGGGGSGGGGSEIVLTQSPATLSLSPGERATLSCRASQSVSSYLAWYQQKPGQAPRLLIYDASNRATGIPARFSGSGSGTDFTLTISSLEPEDFAVYYCQQRSNWPITFGQGTRLEIKRSDPASGAGSGSGSAPGHIRLYVVEKENLPVFPVWVVVGIVTAVVLGLTLLISMILAVLYRRKNSKRDYTGCSTSESLSPVKQAPRKSPSDTEGLVKSLPSGSHQGPVIYAQLDHSGGHHSDKINKSESVVYADIRKNSHG

SEQ ID NO: 7477 - protein, 434 aa, Artificial Sequence
  source: /note="Description of Artificial Sequence: Synthetic Chimeric Antigen Receptor"
MALPVTALLLPLALLLHAARPGSGSGAQAAEVQLVESGGGLVQPGRSLRLSCAASGFTFNDYAMHWVRQAPGKGLEWVSTISWNSGSIGYADSVKGRFTISRDNAKKSLYLQMNSLRAEDTALYYCAKDIQYGNYYYGMDVWGQGTTVTVSSGGGGSGGGGSGGGGSEIVLTQSPATLSLSPGERATLSCRASQSVSSYLAWYQQKPGQAPRLLIYDASNRATGIPARFSGSGSGTDFTLTISSLEPEDFAVYYCQQRSNWPITFGQGTRLEIKRSDPASGAGSGSGSAERRAEVPTAHPSPSPRPAGQFQTLVVGVVGGLLGSLVLLVWVLAVICSRAARGTIGARRTGQPLKEDPSAVPVFSVDYGELDFQWREKTPEPPVPCVPEQTEYATIVFPSGMGTSSPARRGSADGPRSAQPLRPEDGHCSWPLSH

SEQ ID NO: 7478 - protein, 439 aa, Artificial Sequence
  source: /note="Description of Artificial Sequence: Synthetic Chimeric Antigen Receptor"
MALPVTALLLPLALLLHAARPGSGSGAQAAEVQLVESGGGLVQPGRSLRLSCAASGFTFNDYAMHWVRQAPGKGLEWVSTISWNSGSIGYADSVKGRFTISRDNAKKSLYLQMNSLRAEDTALYYCAKDIQYGNYYYGMDVWGQGTTVTVSSGGGGSGGGGSGGGGSEIVLTQSPATLSLSPGERATLSCRASQSVSSYLAWYQQKPGQAPRLLIYDASNRATGIPARFSGSGSGTDFTLTISSLEPEDFAVYYCQQRSNWPITFGQGTRLEIKRSDPASGAGSGSGSAVRVILAPWKKGLIAVVIIGVIIALLIIAAKCYFLRKAKAKQMPVEMSRPAVPLLNSNNEKMSDPNMEANSHYGHNDDVGNHAMKPINDNKEPLNSDVQYTEVQVSSAESHKDLGKKDTETVYSEVRKAVPDAVESRYSRTEGSLDGTSHG

SEQ ID NO: 7479 - protein, 445 aa, Artificial Sequence
  source: /note="Description of Artificial Sequence: Synthetic Chimeric Antigen Receptor"
MALPVTALLLPLALLLHAARPGSGSGAQAAEVQLVESGGGLVQPGRSLRLSCAASGFTFNDYAMHWVRQAPGKGLEWVSTISWNSGSIGYADSVKGRFTISRDNAKKSLYLQMNSLRAEDTALYYCAKDIQYGNYYYGMDVWGQGTTVTVSSGGGGSGGGGSGGGGSEIVLTQSPATLSLSPGERATLSCRASQSVSSYLAWYQQKPGQAPRLLIYDASNRATGIPARFSGSGSGTDFTLTISSLEPEDFAVYYCQQRSNWPITFGQGTRLEIKRSDPASGAGSGSGSAQAVTTTTQRPSSMTTTWRLSSTTTTTGLRVTQGKRRSDSWHISLETAVGVAVAVTVLGIMILGLICLLRWRRRKGQQRTKATTPAREPFQNTEEPYENIRNEGQNTDPKLNPKDDGIVYASLALSSSTSPKAPPSHRPLKSPQNETLYSVLKASHG

SEQ ID NO: 7480 - protein, 381 aa, Artificial Sequence
  source: /note="Description of Artificial Sequence: Synthetic Chimeric Antigen Receptor"
MALPVTALLLPLALLLHAARPGSGSGAQAAEVQLVESGGGLVQPGRSLRLSCAASGFTFNDYAMHWVRQAPGKGLEWVSTISWNSGSIGYADSVKGRFTISRDNAKKSLYLQMNSLRAEDTALYYCAKDIQYGNYYYGMDVWGQGTTVTVSSGGGGSGGGGSGGGGSEIVLTQSPATLSLSPGERATLSCRASQSVSSYLAWYQQKPGQAPRLLIYDASNRATGIPARFSGSGSGTDFTLTISSLEPEDFAVYYCQQRSNWPITFGQGTRLEIKRSDPASGAGSGSGSAVKEGPPSEHSGISRNAIIFLVLGILVFLILLGIGIYFYWSKCSREVLWHCHLCPSSTEHASASANGHVSYSAVSRENSSSQDPQTEGTRSHG

SEQ ID NO: 7481 - protein, 548 aa, Artificial Sequence
  source: /note="Description of Artificial Sequence: Synthetic Chimeric Antigen Receptor"
MALPVTALLLPLALLLHAARPGSGSGAQAAEVQLVESGGGLVQPGRSLRLSCAASGFTFNDYAMHWVRQAPGKGLEWVSTISWNSGSIGYADSVKGRFTISRDNAKKSLYLQMNSLRAEDTALYYCAKDIQYGNYYYGMDVWGQGTTVTVSSGGGGSGGGGSGGGGSEIVLTQSPATLSLSPGERATLSCRASQSVSSYLAWYQQKPGQAPRLLIYDASNRATGIPARFSGSGSGTDFTLTISSLEPEDFAVYYCQQRSNWPITFGQGTRLEIKRSDPASGAGSGSGSAVHYSPKLLGPSCSWEAEGLHCSCSSQASPAPSLRWWLGEELLEGNSSQDSFEVTPSSAGPWANSSLSLHGGLSSGLRLRCEAWNVHGAQSGSILQLPDKKGLISTAFSNGAFLGIGITALLFLCLALIIMKILPKRRTQTETPRPRFSRHSTILDYINVVPTAGPLAQKRNQKATPNSPRTPLPPGAPSPESKKNQKKQYQLPSFPEPKSSTQAPESQESQEELHYATLNFPGVRPRPEARMPKGTQADYAEVKFQSHG

SEQ ID NO: 7482 - protein, 538 aa, Artificial Sequence
  source: /note="Description of Artificial Sequence: Synthetic Chimeric Antigen Receptor"
MALPVTALLLPLALLLHAARPGSGSGAQAAEVQLVESGGGLVQPGRSLRLSCAASGFTFNDYAMHWVRQAPGKGLEWVSTISWNSGSIGYADSVKGRFTISRDNAKKSLYLQMNSLRAEDTALYYCAKDIQYGNYYYGMDVWGQGTTVTVSSGGGGSGGGGSGGGGSEIVLTQSPATLSLSPGERATLSCRASQSVSSYLAWYQQKPGQAPRLLIYDASNRATGIPARFSGSGSGTDFTLTISSLEPEDFAVYYCQQRSNWPITFGQGTRLEIKRSDPASGAGSGSGSAVHYPPQLLGPSCSWEAEGLHCSCSSQASPAPSLRWWLGEELLEGNSSQGSFEVTPSSAGPWANSSLSLHGGLSSGLRLRCKAWNVHGAQSGSVFQLLPGKLEHGGGLGLGAALGAGVAALLAFCSCLVVFRVKICRKEARKRAAAEQDVPSTLGPISQGHQHECSAGSSQDHPPPGAATYTPGKGEEQELHYASLSFQGLRLWEPADQEAPSTTEYSEIKIHTGQPLRGPGFGLQLEREMSGMVPKSHG

SEQ ID NO: 7483 - protein, 425 aa, Artificial Sequence
  source: /note="Description of Artificial Sequence: Synthetic Chimeric Antigen Receptor"
MALPVTALLLPLALLLHAARPGSGSGAQAAEVQLVESGGGLVQPGRSLRLSCAASGFTFNDYAMHWVRQAPGKGLEWVSTISWNSGSIGYADSVKGRFTISRDNAKKSLYLQMNSLRAEDTALYYCAKDIQYGNYYYGMDVWGQGTTVTVSSGGGGSGGGGSGGGGSEIVLTQSPATLSLSPGERATLSCRASQSVSSYLAWYQQKPGQAPRLLIYDASNRATGIPARFSGSGSGTDFTLTISSLEPEDFAVYYCQQRSNWPITFGQGTRLEIKRSDPASGAGSGSGSALQNEYTGKMRPISGVTLGAFGGAGATALVFLYFCIIFVVVRSCRKKSARPAVGVGDTGMEDANAVRGSASQGPLIESPADDSPPHHAPPALATPSPEEGEIQYASLSFHKARPQYPQEQEAIGYEYSEINIPKSHG

SEQ ID NO: 7484 - protein, 513 aa, Artificial Sequence
  source: /note="Description of Artificial Sequence: Synthetic Chimeric Antigen Receptor"
MALPVTALLLPLALLLHAARPGSGSGAQAAEVQLVESGGGLVQPGRSLRLSCAASGFTFNDYAMHWVRQAPGKGLEWVSTISWNSGSIGYADSVKGRFTISRDNAKKSLYLQMNSLRAEDTALYYCAKDIQYGNYYYGMDVWGQGTTVTVSSGGGGSGGGGSGGGGSEIVLTQSPATLSLSPGERATLSCRASQSVSSYLAWYQQKPGQAPRLLIYDASNRATGIPARFSGSGSGTDFTLTISSLEPEDFAVYYCQQRSNWPITFGQGTRLEIKRSDPASGAGSGSGSAVYSLPQLLGPSCSWEAEGLHCRCSFRAWPAPSLCWRLEEKPLEGNSSQGSFKVNSSSPGPWANSSLILHGGLNSDLKVSCKAWNIYGSQSGSVLLLQGRSNLGTGVVPAALGGAGVMALLCICLCLIFFLIVKARRKQAAGRPEKMDDEDPIMGTITSGSRKKPWPDSPGDQASPPGDAPPLEEQKELHYASLSFSEMKSREPKDQEAPSTTEYSEIKTSKSHG

SEQ ID NO: 7485 - protein, 412 aa, Artificial Sequence
  source: /note="Description of Artificial Sequence: Synthetic Chimeric Antigen Receptor"
MALPVTALLLPLALLLHAARPGSGSGAQAAEVQLVESGGGLVQPGRSLRLSCAASGFTFNDYAMHWVRQAPGKGLEWVSTISWNSGSIGYADSVKGRFTISRDNAKKSLYLQMNSLRAEDTALYYCAKDIQYGNYYYGMDVWGQGTTVTVSSGGGGSGGGGSGGGGSEIVLTQSPATLSLSPGERATLSCRASQSVSSYLAWYQQKPGQAPRLLIYDASNRATGIPARFSGSGSGTDFTLTISSLEPEDFAVYYCQQRSNWPITFGQGTRLEIKRSDPASGAGSGSGSALFVHWKPEGRAGGVLGAVWGASITTLVFLCVCFIFRVKTRRKKAAQPVQNTDDVNPVMVSGSRGHQHQFQTGIVSDHPAEAGPISEDEQELHYAVLHFHKVQPQEPKVTDTEYSEIKIHKSHG

SEQ ID NO: 7486 - protein, 423 aa, Artificial Sequence
  source: /note="Description of Artificial Sequence: Synthetic Chimeric Antigen Receptor"
MALPVTALLLPLALLLHAARPGSGSGAQAAEVQLVESGGGLVQPGRSLRLSCAASGFTFNDYAMHWVRQAPGKGLEWVSTISWNSGSIGYADSVKGRFTISRDNAKKSLYLQMNSLRAEDTALYYCAKDIQYGNYYYGMDVWGQGTTVTVSSGGGGSGGGGSGGGGSEIVLTQSPATLSLSPGERATLSCRASQSVSSYLAWYQQKPGQAPRLLIYDASNRATGIPARFSGSGSGTDFTLTISSLEPEDFAVYYCQQRSNWPITFGQGTRLEIKRSDPASGAGSGSGSALQQEYTGKMRPVSGVLLGAVGGAGATALVFLSFCVIFIVVRSCRKKSARPAADVGDIGMKDANTIRGSASQGNLTESWADDNPRHHGLAAHSSGEEREIQYAPLSFHKGEPQDLSGQEATNNEYSEIKIPKSHG

SEQ ID NO: 7487 - protein, 447 aa, Artificial Sequence
  source: /note="Description of Artificial Sequence: Synthetic Chimeric Antigen Receptor"
MALPVTALLLPLALLLHAARPGSGSGAQAAEVQLVESGGGLVQPGRSLRLSCAASGFTFNDYAMHWVRQAPGKGLEWVSTISWNSGSIGYADSVKGRFTISRDNAKKSLYLQMNSLRAEDTALYYCAKDIQYGNYYYGMDVWGQGTTVTVSSGGGGSGGGGSGGGGSEIVLTQSPATLSLSPGERATLSCRASQSVSSYLAWYQQKPGQAPRLLIYDASNRATGIPARFSGSGSGTDFTLTISSLEPEDFAVYYCQQRSNWPITFGQGTRLEIKRSDPASGAGSGSGSALQNEGTGTSRPVSQVTLAAVGGAGATALAFLSFCIIFIIVRSCRKKSARPAAGVGDTGMEDAKAIRGSASQGPLTESWKDGNPLKKPPPAVAPSSGEEGELHYATLSFHKVKPQDPQGQEATDSEYSEIKIHKRETAETQACLRNHNPSSKEVRGSHG

SEQ ID NO: 7488 - protein, 419 aa, Artificial Sequence
  source: /note="Description of Artificial Sequence: Synthetic Chimeric Antigen Receptor"
MALPVTALLLPLALLLHAARPGSGSGAQAAEVQLVESGGGLVQPGRSLRLSCAASGFTFNDYAMHWVRQAPGKGLEWVSTISWNSGSIGYADSVKGRFTISRDNAKKSLYLQMNSLRAEDTALYYCAKDIQYGNYYYGMDVWGQGTTVTVSSGGGGSGGGGSGGGGSEIVLTQSPATLSLSPGERATLSCRASQSVSSYLAWYQQKPGQAPRLLIYDASNRATGIPARFSGSGSGTDFTLTISSLEPEDFAVYYCQQRSNWPITFGQGTRLEIKRSDPASGAGSGSGSALQSKATSGVTQGVVGGAGATALVFLSFCVIFVVVRSCRKKSARPAAGVGDTGIEDANAVRGSASQGPLTEPWAEDSPPDQPPPASARSSVGEGELQYASLSFQMVKPWDSRGQEATDTEYSEIKIHRSHG

SEQ ID NO: 7489 - protein, 531 aa, Artificial Sequence
  source: /note="Description of Artificial Sequence: Synthetic Chimeric Antigen Receptor"
MALPVTALLLPLALLLHAARPGSGSGAQAAEVQLVESGGGLVQPGRSLRLSCAASGFTFNDYAMHWVRQAPGKGLEWVSTISWNSGSIGYADSVKGRFTISRDNAKKSLYLQMNSLRAEDTALYYCAKDIQYGNYYYGMDVWGQGTTVTVSSGGGGSGGGGSGGGGSEIVLTQSPATLSLSPGERATLSCRASQSVSSYLAWYQQKPGQAPRLLIYDASNRATGIPARFSGSGSGTDFTLTISSLEPEDFAVYYCQQRSNWPITFGQGTRLEIKRSDPASGAGSGSGSAVHKESGNGHNIWVILVVTLVVPLLLVAVLIVCCCIGSGCGGDPKCMDRVCFWRLGLLRGPGAEDNAHNEILSNADSLSTFVSEQQMESQEPADLTGVTVQSPGEAQCLLGPAEAEGSQRRRLLVPANGADPTETLMLFFDKFANIVPFDSWDQLMRQLDLTKNEIDVVRAGTAGPGDALYAMLMKWVNKTGRNASIHTLLDALERMEERHAKEKIQDLLVDSGKFIYLEDGTGSAVSLESHG

SEQ ID NO: 7490 - protein, 554 aa, Artificial Sequence
  source: /note="Description of Artificial Sequence: Synthetic Chimeric Antigen Receptor"
MALPVTALLLPLALLLHAARPGSGSGAQAAEVQLVESGGGLVQPGRSLRLSCAASGFTFNDYAMHWVRQAPGKGLEWVSTISWNSGSIGYADSVKGRFTISRDNAKKSLYLQMNSLRAEDTALYYCAKDIQYGNYYYGMDVWGQGTTVTVSSGGGGSGGGGSGGGGSEIVLTQSPATLSLSPGERATLSCRASQSVSSYLAWYQQKPGQAPRLLIYDASNRATGIPARFSGSGSGTDFTLTISSLEPEDFAVYYCQQRSNWPITFGQGTRLEIKRSDPASGAGSGSGSAVHKESGTKHSGEAPAVEETVTSSPGTPASPCSLSGIIIGVTVAAVVLIVAVFVCKSLLWKKVLPYLKGICSGGGGDPERVDRSSQRPGAEDNVLNEIVSILQPTQVPEQEMEVQEPAEPTGVNMLSPGESEHLLEPAEAERSQRRRLLVPANEGDPTETLRQCFDDFADLVPFDSWEPLMRKLGLMDNEIKVAKAEAAGHRDTLYTMLIKWVNKTGRDASVHTLLDALETLGERLAKQKIEDHLLSSGKFMYLEGNADSAMSSHG

SEQ ID NO: 7491 - protein, 498 aa, Artificial Sequence
  source: /note="Description of Artificial Sequence: Synthetic Chimeric Antigen Receptor"
MALPVTALLLPLALLLHAARPGSGSGAQAAEVQLVESGGGLVQPGRSLRLSCAASGFTFNDYAMHWVRQAPGKGLEWVSTISWNSGSIGYADSVKGRFTISRDNAKKSLYLQMNSLRAEDTALYYCAKDIQYGNYYYGMDVWGQGTTVTVSSGGGGSGGGGSGGGGSEIVLTQSPATLSLSPGERATLSCRASQSVSSYLAWYQQKPGQAPRLLIYDASNRATGIPARFSGSGSGTDFTLTISSLEPEDFAVYYCQQRSNWPITFGQGTRLEIKRSDPASGAGSGSGSAKNESAASSTGKTPAAEETVTTILGMLASPYHYLIIIVVLVIILAVVVVGFSCRKKFISYLKGICSGGGGGPERVHRVLFRRRSCPSRVPGAEDNARNETLSNRYLQPTQVSEQEIQGQELAELTGVTVELPEEPQRLLEQAEAEGCQRRRLLVPVNDADSADISTLLDASATLEEGHAKETIQDQLVGSEKLFYEEDEAGSATSCLSHG

SEQ ID NO: 7492 - protein, 496 aa, Artificial Sequence
  source: /note="Description of Artificial Sequence: Synthetic Chimeric Antigen Receptor"
MALPVTALLLPLALLLHAARPEVQLVESGAEVKKPGASVKVSCKASGYTFTGYYMHWVRQAPGQGLEWMGWINPNSGGTNYAQKFQGRVTMTRDTSISTAYMELSRLRSDDTAVYYCAREPASSSWYGYYYYMDVWGKGTLVTVSSGGGGSGGGGSGGGGSGGGGSDIQMTQSPSSLSASVGDRVTITCRASQSINTYLNWYQQKPGKPPKLLIYAASNLQSGVPSRFSGSGSGTHFTLTISSLQPDDFATYYCQQSYSSLLTFGGGTKLEIKTTTPAPRPPTPAPTIASQPLSLRPEACRPAAGGAVHTRGLDFACDIYIWAPLAGTCGVLLLSLVITLYCKRGRKKLLYIFKQPFMRPVQTTQEEDGCSCRFPEEEEGGCELRVKFSRSADAPAYKQGQNQLYNELNLGRREEYDVLDKRRGRDPEMGGKPRRKNPQEGLYNELQKDKMAEAYSEIGMKGERRRGKGHDGLYQGLSTATKDTYDALHMQALPPR

SEQ ID NO: 7493 - protein, 495 aa, Artificial Sequence
  source: /note="Description of Artificial Sequence: Synthetic Chimeric Antigen Receptor"
MALPVTALLLPLALLLHAARPQVQLVQSGGGLIQPGGSLRLSCAASGFTVSSNYMSWVRQAPGKGLEWVSVIYSGGSTYYADSVKGRFTISRDNSKNTLYLQMNSLRAEDTAVYYCASQSTPYDSSGYYSGDAFDIWGQGTMVTVSSGGGGSGGGGSGGGGSSYVLTQPPSASGTPGQRVTISCSGSSSNIGSNYVYWYQQLPGTAPKLLIYRNNQRPSGVPDRFSGSKSGTSASLAISGLRSEDEADYYCAAWDDSLSGYVFGTGTKLTVLTTTPAPRPPTPAPTIASQPLSLRPEACRPAAGGAVHTRGLDFACDIYIWAPLAGTCGVLLLSLVITLYCKRGRKKLLYIFKQPFMRPVQTTQEEDGCSCRFPEEEEGGCELRVKFSRSADAPAYKQGQNQLYNELNLGRREEYDVLDKRRGRDPEMGGKPRRKNPQEGLYNELQKDKMAEAYSEIGMKGERRRGKGHDGLYQGLSTATKDTYDALHMQALPPR

SEQ ID NO: 7494 - protein, 498 aa, Artificial Sequence
  source: /note="Description of Artificial Sequence: Synthetic Chimeric Antigen Receptor"
MALPVTALLLPLALLLHAARPEVQLQQSGPGLVKPSQTLSLTCAISGDSVLSNSDTWNWIRQSPSRGLEWLGRTYHRSTWYDDYASSVRGRVSINVDTSKNQYSLQLNAVTPEDTGVYYCARDRLQDGNSWSDAFDVWGQGTMVTVSSGGGGSGGGGSGGGGSQSALTQPASVSGSPGQSITISCTGTSSDVGGYNYVSWYQQHPGKAPKLMIYDVSNRPSGVSNRFSGSKSGNTASLTISGLQAEDEADYYCSSYTSSSTLVYVFGTGTKVTVLTTTPAPRPPTPAPTIASQPLSLRPEACRPAAGGAVHTRGLDFACDIYIWAPLAGTCGVLLLSLVITLYCKRGRKKLLYIFKQPFMRPVQTTQEEDGCSCRFPEEEEGGCELRVKFSRSADAPAYKQGQNQLYNELNLGRREEYDVLDKRRGRDPEMGGKPRRKNPQEGLYNELQKDKMAEAYSEIGMKGERRRGKGHDGLYQGLSTATKDTYDALHMQALPPR

SEQ ID NO: 7495 - protein, 493 aa, Artificial Sequence
  source: /note="Description of Artificial Sequence: Synthetic Chimeric Antigen Receptor"
MALPVTALLLPLALLLHAARPEVQLQQSGPGLVKPSQTLSLTCAISGDSVSSNSAAWNWIRQSPSRGLEWLGRTYYRSKWYNDYAVSVKSRITINPDTSKNQFSLQLNSVTPEDTAVYYCAREESSSGWYEGNWFDPWGQGTLVTVSSGGGGSGGGGSGGGGSSSELTQDPAVSVALGQTVRITCQGDSLRSYYASWYQQKPGQAPVLVIYGKNHRPSGIPDRFSGSSSGDTDSLTITGAQAEDEADYYCHSRDSSGNHLFGGGTKLTVLTTTPAPRPPTPAPTIASQPLSLRPEACRPAAGGAVHTRGLDFACDIYIWAPLAGTCGVLLLSLVITLYCKRGRKKLLYIFKQPFMRPVQTTQEEDGCSCRFPEEEEGGCELRVKFSRSADAPAYKQGQNQLYNELNLGRREEYDVLDKRRGRDPEMGGKPRRKNPQEGLYNELQKDKMAEAYSEIGMKGERRRGKGHDGLYQGLSTATKDTYDALHMQALPPR

SEQ ID NO: 7496 - protein, 497 aa, Artificial Sequence
  source: /note="Description of Artificial Sequence: Synthetic Chimeric Antigen Receptor"
MALPVTALLLPLALLLHAARPEVQLQQSGPGLVKPSQTLSLTCAISGDSVLSNSDTWNWIRQSPSRGLEWLGRTYHRSTWYDDYASSVRGRVSINVDTSKNQYSLQLNAVTPEDTGVYYCARDRLQDGNSWSDAFDVWGQGTMVTVSSGGGGSGGGGSGGGGSQSALTQPASASGSPGQSVTISCTGTSSDVGGYNYVSWYQQHPGKAPKLMIYDVSNRPSGVSNRFSGSKSGNTASLTISGLQAEDEADYYCSSYTSSSTLYVFGTGTQLTVLTTTPAPRPPTPAPTIASQPLSLRPEACRPAAGGAVHTRGLDFACDIYIWAPLAGTCGVLLLSLVITLYCKRGRKKLLYIFKQPFMRPVQTTQEEDGCSCRFPEEEEGGCELRVKFSRSADAPAYKQGQNQLYNELNLGRREEYDVLDKRRGRDPEMGGKPRRKNPQEGLYNELQKDKMAEAYSEIGMKGERRRGKGHDGLYQGLSTATKDTYDALHMQALPPR

SEQ ID NO: 7497 - protein, 489 aa, Artificial Sequence
  source: /note="Description of Artificial Sequence: Synthetic Chimeric Antigen Receptor"
MALPVTALLLPLALLLHAARPQVQLQESGPGLVKPSETLSLTCTVSGGSISSSSYYWGWIRQPPGKGLEWIGSIYYSGSTYYNPSLKSRVTISVDTSKNQFSLKLSSVTAADTAVYYCARGRMDTAMAQIWGQGTMVTVSSGDGGSGGGGSGGGGSNFMLTQPHSVSESPGKTVTIPCTGSSGSFASSYVQWYQQRPGSAPATVIYEDNQRPSGVPDRFSGSVDSSSNSASLTISGLKTEDEAVYYCQSYDGATWVFGGGTKLTVLTTTPAPRPPTPAPTIASQPLSLRPEACRPAAGGAVHTRGLDFACDIYIWAPLAGTCGVLLLSLVITLYCKRGRKKLLYIFKQPFMRPVQTTQEEDGCSCRFPEEEEGGCELRVKFSRSADAPAYKQGQNQLYNELNLGRREEYDVLDKRRGRDPEMGGKPRRKNPQEGLYNELQKDKMAEAYSEIGMKGERRRGKGHDGLYQGLSTATKDTYDALHMQALPPR

SEQ ID NO: 7498 - protein, 486 aa, Artificial Sequence
  source: /note="Description of Artificial Sequence: Synthetic Chimeric Antigen Receptor"
MALPVTALLLPLALLLHAARPQVQLVQSGAEVKKPGASVKVSCKASGYTFTSYYMHWVRQAPGQGLEWMGIINPSGGSTSYAQKFQGRVTMTRDTSTSTVYMELSSLRSEDTAVYYCARDLDVSLDIWGQGTMVTVSSGGGGSGGGGSGGGGSQSALTQPASVSGSPGQSITISCSGTSSDVGGYNSVSWYQQYPGKAPKLMIYDVNNRPSGVSSRFSGSKSGNTASLTISGLQAEDEADYYCSSYTSSSTLFFGAGTKVTVLTTTPAPRPPTPAPTIASQPLSLRPEACRPAAGGAVHTRGLDFACDIYIWAPLAGTCGVLLLSLVITLYCKRGRKKLLYIFKQPFMRPVQTTQEEDGCSCRFPEEEEGGCELRVKFSRSADAPAYKQGQNQLYNELNLGRREEYDVLDKRRGRDPEMGGKPRRKNPQEGLYNELQKDKMAEAYSEIGMKGERRRGKGHDGLYQGLSTATKDTYDALHMQALPPR

SEQ ID NO: 7499 - protein, 491 aa, Artificial Sequence
  source: /note="Description of Artificial Sequence: Synthetic Chimeric Antigen Receptor"
MALPVTALLLPLALLLHAARPEVQLVESGGGLVQPGGSLRLSCAASGFTFSSYAMHWVRQAPGKGLEYVSAISSNGGSTYYANSVKDRFTISRDNSKNTLYLQMGSLRAEDMAVYYCARVHSSGYYHPGPNDYWGQGTLVTVSSGGGGSGGGGSGGGGSSSELTQDPAVSVALGQTVRITCQGDSLRTYYATWYQQKPGQAPVLVFYDENNRPSGIPDRFSGSSSGNTASLTITGTQAEDEADYYCSSRDSSGNPSCVFGGGTKLTVLTTTPAPRPPTPAPTIASQPLSLRPEACRPAAGGAVHTRGLDFACDIYIWAPLAGTCGVLLLSLVITLYCKRGRKKLLYIFKQPFMRPVQTTQEEDGCSCRFPEEEEGGCELRVKFSRSADAPAYKQGQNQLYNELNLGRREEYDVLDKRRGRDPEMGGKPRRKNPQEGLYNELQKDKMAEAYSEIGMKGERRRGKGHDGLYQGLSTATKDTYDALHMQALPPR

SEQ ID NO: 7500 - protein, 487 aa, Artificial Sequence
  source: /note="Description of Artificial Sequence: Synthetic Chimeric Antigen Receptor"
MALPVTALLLPLALLLHAARPEVQLVESGAEVKKPGASVKVSCKASGYTFTSYYMHWVRQAPGQGLEWMGIINPSGGSTSYAQKFQGRVTMTRDTSTSTAYMELSSLRSEDTAVYYCAREAGVVAVDYWGQGTLVTVSSGGGGSGGGGSGGGGSQSALTQPASVSGSPGQSITISCTGTSSDVGGYNYVSWYQQHPGKAPKLMIYDVSNRPSGVSNRFSGSKSGNTASLTISGLQAEDEADYYCSSYTSSSTWVFGGGTKLTVLTTTPAPRPPTPAPTIASQPLSLRPEACRPAAGGAVHTRGLDFACDIYIWAPLAGTCGVLLLSLVITLYCKRGRKKLLYIFKQPFMRPVQTTQEEDGCSCRFPEEEEGGCELRVKFSRSADAPAYKQGQNQLYNELNLGRREEYDVLDKRRGRDPEMGGKPRRKNPQEGLYNELQKDKMAEAYSEIGMKGERRRGKGHDGLYQGLSTATKDTYDALHMQALPPR

SEQ ID NO: 7501 - protein, 494 aa, Artificial Sequence
  source: /note="Description of Artificial Sequence: Synthetic Chimeric Antigen Receptor"
MALPVTALLLPLALLLHAARPQVQLVQSGGGVVQPGRSLRLSCAASGFTFSSYAMSWVRQAPGKGLEWVSAISGSGGSTYYADSVKGRFTISRDNSKNTLYLQMNSLRAEDTAVYYCAKEPLFGVVEEDVDYWGQGTLVTVSSGGGGSGGGGSGGGGSDVVMTQSPLSLPVTPGEPASISCRSSQSLLAGNGHNYLDWYLQKPGQSPQLLIYLGSNRASGVPDRFSGSGSGTDFTLKISRVEAEDVGVYYCMQALQNPLTFGGGTKLEIKRTTTPAPRPPTPAPTIASQPLSLRPEACRPAAGGAVHTRGLDFACDIYIWAPLAGTCGVLLLSLVITLYCKRGRKKLLYIFKQPFMRPVQTTQEEDGCSCRFPEEEEGGCELRVKFSRSADAPAYKQGQNQLYNELNLGRREEYDVLDKRRGRDPEMGGKPRRKNPQEGLYNELQKDKMAEAYSEIGMKGERRRGKGHDGLYQGLSTATKDTYDALHMQALPPR

SEQ ID NO: 7502 - protein, 489 aa, Artificial Sequence
  source: /note="Description of Artificial Sequence: Synthetic Chimeric Antigen Receptor"
MALPVTALLLPLALLLHAARPQVQLVQSGAEVKKPGASVKVSCKASGYTFTSYYMHWVRQAPGQGLEWMGIINPSGGSTSYAQKFQGRVTMTRDTSTSTVYMELSSLRSEDTAVYYCARGSGSLGDAFDIWGQGTMVTVSSGGGGSGGGGSGGGGSQSALTQPASVSGSPGQSITISCTGSSSDVGGYNYVSWYQQHPGKAPKLMIYEVSNRPSGVSNRFSGSKSGNTASLTISGLQAEDEADYYCSSYTSSSTLVFGTGTKVTVLTTTPAPRPPTPAPTIASQPLSLRPEACRPAAGGAVHTRGLDFACDIYIWAPLAGTCGVLLLSLVITLYCKRGRKKLLYIFKQPFMRPVQTTQEEDGCSCRFPEEEEGGCELRVKFSRSADAPAYKQGQNQLYNELNLGRREEYDVLDKRRGRDPEMGGKPRRKNPQEGLYNELQKDKMAEAYSEIGMKGERRRGKGHDGLYQGLSTATKDTYDALHMQALPPR

SEQ ID NO: 7503 - protein, 490 aa, Artificial Sequence
  source: /note="Description of Artificial Sequence: Synthetic Chimeric Antigen Receptor"
MALPVTALLLPLALLLHAARPQVQLVQSGAEVKKPGASVKVSCKASGYTFTSYYMHWVRQAPGQGLEWMGIINPSGGSTSYAQKFQGRVTMTRDTSTSTVYMELSSLRSEDTAVYYCARDGFGELSGAFDIWGQGTMVTVSSGGGGSGGGGSGGGGSQSALTQPASVSGSPGQSITISCTGTSSDVGGYNYVSWYQQHPGKAPKLMIYDVSNRPSGVSNRFSGSKSGNTASLTISGLQAEDEADYYCSSYASSSTLVFGGGTKVTVLTTTPAPRPPTPAPTIASQPLSLRPEACRPAAGGAVHTRGLDFACDIYIWAPLAGTCGVLLLSLVITLYCKRGRKKLLYIFKQPFMRPVQTTQEEDGCSCRFPEEEEGGCELRVKFSRSADAPAYKQGQNQLYNELNLGRREEYDVLDKRRGRDPEMGGKPRRKNPQEGLYNELQKDKMAEAYSEIGMKGERRRGKGHDGLYQGLSTATKDTYDALHMQALPPR

SEQ ID NO: 7504 - protein, 495 aa, Artificial Sequence
  source: /note="Description of Artificial Sequence: Synthetic Chimeric Antigen Receptor"
MALPVTALLLPLALLLHAARPEVQLQQSGPGLVKPSQTLSLTCAISGDSVSSNSAAWNWIRQSPSRGLEWLGRTYYRSKWYNDYAVSVKSRITINPDTSKNQFSLQLNSVTPEDTAVYYCARDLGWIAVAGTFDYWGQGTLVTVSSGGGGSGGGGSGGGGSQSALTQPASVSGSPGQSITISCTGTSSDVGGYNYVSWYQQHPGKAPKLMIYDVSKRPSGVSNRFSGSKSGNTASLTISGLQAEDEADYYCSSYTSSSLNHVFGTGTKVTVLTTTPAPRPPTPAPTIASQPLSLRPEACRPAAGGAVHTRGLDFACDIYIWAPLAGTCGVLLLSLVITLYCKRGRKKLLYIFKQPFMRPVQTTQEEDGCSCRFPEEEEGGCELRVKFSRSADAPAYKQGQNQLYNELNLGRREEYDVLDKRRGRDPEMGGKPRRKNPQEGLYNELQKDKMAEAYSEIGMKGERRRGKGHDGLYQGLSTATKDTYDALHMQALPPR

SEQ ID NO: 7505 - protein, 491 aa, Artificial Sequence
  source: /note="Description of Artificial Sequence: Synthetic Chimeric Antigen Receptor"
MALPVTALLLPLALLLHAARPEVQLVESGAEVKKPGASVKVSCKASGYTFTSYYMHWVRQAPGQGLEWMGIINPSGGSTSYAQKFQGRVTMTRDTSTSTVYMELSSLRSEDTAVYYCARGPIGCSGGSCLDYWGQGTLVTVSSGGGGSGGGGSGGGGSQSALTQPAYVSGSPGQSITISCTGTNSDVGRYNYVSWYQQHPGKAPKLMIYEVSYRPSGVSNRFSGSKSGNTASLTISGLQAEDEADYYCSSYTTSSTLDFGTGTKVTVLTTTPAPRPPTPAPTIASQPLSLRPEACRPAAGGAVHTRGLDFACDIYIWAPLAGTCGVLLLSLVITLYCKRGRKKLLYIFKQPFMRPVQTTQEEDGCSCRFPEEEEGGCELRVKFSRSADAPAYKQGQNQLYNELNLGRREEYDVLDKRRGRDPEMGGKPRRKNPQEGLYNELQKDKMAEAYSEIGMKGERRRGKGHDGLYQGLSTATKDTYDALHMQALPPR

SEQ ID NO: 7506 - protein, 490 aa, Artificial Sequence
  source: /note="Description of Artificial Sequence: Synthetic Chimeric Antigen Receptor"
MALPVTALLLPLALLLHAARPQVQLVQSGAEVKKPGASVKVSCKASGYTFTSYYMHWVRQAPGQGLEWMGIINPSGGSTSYAQKFQGRVTMTRDTSTSTVYMELSSLRSEDTAVYYCARGSYGDYGDAFDIWGQGTTVTVSSGGGGSGGGGSGSGGSQSALTQPASVSGSPGQSITISCTGTSSDVGGYKYVSWYQQHPGKAPKLMIYDVSNRPSGVSNRFSGSKSGNTASLTISGLQAEDEADYYCSSYTSSSTLVFGGGTKLTVLTTTPAPRPPTPAPTIASQPLSLRPEACRPAAGGAVHTRGLDFACDIYIWAPLAGTCGVLLLSLVITLYCKRGRKKLLYIFKQPFMRPVQTTQEEDGCSCRFPEEEEGGCELRVKFSRSADAPAYKQGQNQLYNELNLGRREEYDVLDKRRGRDPEMGGKPRRKNPQEGLYNELQKDKMAEAYSEIGMKGERRRGKGHDGLYQGLSTATKDTYDALHMQALPPR

SEQ ID NO: 7507 - protein, 488 aa, Artificial Sequence
  source: /note="Description of Artificial Sequence: Synthetic Chimeric Antigen Receptor"
MALPVTALLLPLALLLHAARPEVQLVESGAEVKKPGSSVKVSCKASGGTFSSYAISWVRQAPGQGLEWMGGIIPIFGTANYAQKFQGRVTITADESTSTAYMELSSLRSEDTAVYYCARDHKVVRFGYWGQGTLVTVSSGGGGSGGGGSGGGGSHVILTQPPSASASLGASVKLTCTLSSGHSSYAIAWHQQQPEKGPRYLMKVNSDGSLSKGDGIPDRFSGSTSGAERYLTISSLQSEDEADYYCQTWGSGMAIFGGGTKLTVLTTTPAPRPPTPAPTIASQPLSLRPEACRPAAGGAVHTRGLDFACDIYIWAPLAGTCGVLLLSLVITLYCKRGRKKLLYIFKQPFMRPVQTTQEEDGCSCRFPEEEEGGCELRVKFSRSADAPAYKQGQNQLYNELNLGRREEYDVLDKRRGRDPEMGGKPRRKNPQEGLYNELQKDKMAEAYSEIGMKGERRRGKGHDGLYQGLSTATKDTYDALHMQALPPR

SEQ ID NO: 7508 - protein, 485 aa, Artificial Sequence
  source: /note="Description of Artificial Sequence: Synthetic Chimeric Antigen Receptor"
MALPVTALLLPLALLLHAARPQVQLVQSGAEVKKPGASVKVSCKASGYTFTSYYMHWVRQAPGQGLEWMGIINPSGGSTSYAQKFQGRVTMTRDTSTSTVYMELSSLRSEDTAVYYCARGDYYMDVWGKGTTVTVSSGGGGSGGGGSGGGGSQSALTQPASASGSPGQSVTISCTGTSSDVGGYNYVSWYQQHPGKAPKLMIYEVSKRPSGVPDRFSGSKSGNTASLTISGLQAEDEADYYCSSYTSSGTLVFGGGTKLTVLTTTPAPRPPTPAPTIASQPLSLRPEACRPAAGGAVHTRGLDFACDIYIWAPLAGTCGVLLLSLVITLYCKRGRKKLLYIFKQPFMRPVQTTQEEDGCSCRFPEEEEGGCELRVKFSRSADAPAYKQGQNQLYNELNLGRREEYDVLDKRRGRDPEMGGKPRRKNPQEGLYNELQKDKMAEAYSEIGMKGERRRGKGHDGLYQGLSTATKDTYDALHMQALPPR

SEQ ID NO: 7509 - protein, 491 aa, Artificial Sequence
  source: /note="Description of Artificial Sequence: Synthetic Chimeric Antigen Receptor"
MALPVTALLLPLALLLHAARPEVQLVESGGGLVQPGGSLRLSCAASGFTFSSYAMSWVRQAPGKGLEWVSYISSSSSTIYYADSVKGRFTISRDNAKNSLYLQMNSLRAEDTAVYYCARDGPIRYFDHSKAFDIWGQGTMVTVSSGGGGSGGGGSGGGGSSSELTQDPAVSVALGQTVRITCQGDSLRSYYASWYQQKPGQAPVLVIYGKNNRPSGIPDRFSGSSSGNTASLTITGAQAEDEADYYRNSRDSSGNPYVFGTGTKVTVLTTTPAPRPPTPAPTIASQPLSLRPEACRPAAGGAVHTRGLDFACDIYIWAPLAGTCGVLLLSLVITLYCKRGRKKLLYIFKQPFMRPVQTTQEEDGCSCRFPEEEEGGCELRVKFSRSADAPAYKQGQNQLYNELNLGRREEYDVLDKRRGRDPEMGGKPRRKNPQEGLYNELQKDKMAEAYSEIGMKGERRRGKGHDGLYQGLSTATKDTYDALHMQALPPR

SEQ ID NO: 7510 - protein, 488 aa, Artificial Sequence
  source: /note="Description of Artificial Sequence: Synthetic Chimeric Antigen Receptor"
MALPVTALLLPLALLLHAARPQVQLVQSGAEVKKPGASVKVSCKASGYTFTSYYMHWVRQAPGQGLEWMGIINPSGGSTSYAQKFQGRVTMTRDTSISTAYMELSRLRSDDTAVYYCAREMDDSSGPDYWGQGTLVTVSSGGGGSGGGGSGGGGSQSALTQPASVSGSPGQSITISCTGTSSDVGGYNYVSWYQQHPGKAPKLMIYEVSNRPSGVSNRFSGSKSGNTASLTISGLQAEDEADYYCSSYTSSSTLVFGTGTKLTVLTTTPAPRPPTPAPTIASQPLSLRPEACRPAAGGAVHTRGLDFACDIYIWAPLAGTCGVLLLSLVITLYCKRGRKKLLYIFKQPFMRPVQTTQEEDGCSCRFPEEEEGGCELRVKFSRSADAPAYKQGQNQLYNELNLGRREEYDVLDKRRGRDPEMGGKPRRKNPQEGLYNELQKDKMAEAYSEIGMKGERRRGKGHDGLYQGLSTATKDTYDALHMQALPPR

SEQ ID NO: 7511 - protein, 496 aa, Artificial Sequence
  source: /note="Description of Artificial Sequence: Synthetic Chimeric Antigen Receptor"
MALPVTALLLPLALLLHAARPEVQLVESGAEVKKPGESLKISCKGSGYSFTGSWIGWGRQMPGKGLEWMGIIYPGDSDTRYSPSFQGQVTISADKSISTAYLQWSSLKASDTAMYYCARGFLRGGDCCGALDIWGQGTMVTVSSGGGGSGGGGSGGGGSDIVMTQSPLSLPVTPGEPASISCRSSQSLLHSNGYNYLDWYLQKPGQSPQLLIYLGSNRASGVPDRFSGSGSGTDFTLKISRVEAEDVGVYYCMQALQTPPWTFGQGTKLEIKRTTTPAPRPPTPAPTIASQPLSLRPEACRPAAGGAVHTRGLDFACDIYIWAPLAGTCGVLLLSLVITLYCKRGRKKLLYIFKQPFMRPVQTTQEEDGCSCRFPEEEEGGCELRVKFSRSADAPAYKQGQNQLYNELNLGRREEYDVLDKRRGRDPEMGGKPRRKNPQEGLYNELQKDKMAEAYSEIGMKGERRRGKGHDGLYQGLSTATKDTYDALHMQALPPR

SEQ ID NO: 7512 - protein, 494 aa, Artificial Sequence
  source: /note="Description of Artificial Sequence: Synthetic Chimeric Antigen Receptor"
MALPVTALLLPLALLLHAARPQVQLQESGPGLVKPSETLSLTCSVSGGSINSYYWSWIRQAPGKGLEWIAFTSHSGNVKYNPSLTGRVTIAVDTSKNQFYLEVTSVTAADTAVYFCARGLDPLFAYDAFEIWGLGTMVTVSSGGGGSGGGGSGGGGSEIVLTQSPLSLPVTPGEPASISCRSSQSLLHSNGYNYLDWYLQKPGQSPQLLIYLGSNRASGVPDRFSGSGSGTDFTLKISRVEAEDVGVYYCMQVLQTPPLTFGGGTKVDIKRTTTPAPRPPTPAPTIASQPLSLRPEACRPAAGGAVHTRGLDFACDIYIWAPLAGTCGVLLLSLVITLYCKRGRKKLLYIFKQPFMRPVQTTQEEDGCSCRFPEEEEGGCELRVKFSRSADAPAYKQGQNQLYNELNLGRREEYDVLDKRRGRDPEMGGKPRRKNPQEGLYNELQKDKMAEAYSEIGMKGERRRGKGHDGLYQGLSTATKDTYDALHMQALPPR

SEQ ID NO: 7513 - protein, 491 aa, Artificial Sequence
  source: /note="Description of Artificial Sequence: Synthetic Chimeric Antigen Receptor"
MALPVTALLLPLALLLHAARPEVQLVESGGGLVKPGGSLRLSCAASGFTFSDYYMSWIRQAPGKGLEWVSYISSSGSTIYYADSVKGRFTISRDNAKNSLYLQMNSLRAEDTAVYYCARDDFWSGSVDYWGQGTLVTVSSGGGGSGGGGSGGGGSGGGGSSYVLTQPPSVSVAPGKTATITCGGTNIGSKNVHWYQQKPGQAPVLAIYYDSDRPSGIPERFSGSNSGNTATLTISRVEAGDEADYFCQVWDSSSDHWVFGGGTKLTVLTTTPAPRPPTPAPTIASQPLSLRPEACRPAAGGAVHTRGLDFACDIYIWAPLAGTCGVLLLSLVITLYCKRGRKKLLYIFKQPFMRPVQTTQEEDGCSCRFPEEEEGGCELRVKFSRSADAPAYKQGQNQLYNELNLGRREEYDVLDKRRGRDPEMGGKPRRKNPQEGLYNELQKDKMAEAYSEIGMKGERRRGKGHDGLYQGLSTATKDTYDALHMQALPPR

SEQ ID NO: 7514 - protein, 494 aa, Artificial Sequence
  source: /note="Description of Artificial Sequence: Synthetic Chimeric Antigen Receptor"
MALPVTALLLPLALLLHAARPQVQLVQSGAEVKKPGASVKVSCKASGYTFTSYYMHWVRQAPGQGLEWMGIINPSGGSTSYAQKFQGRVTMTRDTSTSTVYMELSSLRSEDTAVYYCAREDDSSGYTSPFDYWGQGTLVTVSSGGGGSGGGGSGGGGSGGGRSSYELTQPPSVSVAPGETASIACGGHNIRSKNVHWYQQKPGQAPVLVISYDGDRPSGIPERFSGSNLGSTATLTISRVEAGDEADYYCQVWDSDSDHYVFGTGTKVTVLTTTPAPRPPTPAPTIASQPLSLRPEACRPAAGGAVHTRGLDFACDIYIWAPLAGTCGVLLLSLVITLYCKRGRKKLLYIFKQPFMRPVQTTQEEDGCSCRFPEEEEGGCELRVKFSRSADAPAYKQGQNQLYNELNLGRREEYDVLDKRRGRDPEMGGKPRRKNPQEGLYNELQKDKMAEAYSEIGMKGERRRGKGHDGLYQGLSTATKDTYDALHMQALPPR

SEQ ID NO: 7515 - protein, 284 aa, Artificial Sequence
  source: /note="Description of Artificial Sequence: Synthetic Chimeric Antigen Receptor"
MALPVTALLLPLALLLHAARPEVQLQQSGPGLVKPSQTLSLTCAISGDSVLSNSDTWNWIRQSPSRGLEWLGRTYHRSTWYDDYASSVRGRVSINVDTSKNQYSLQLNAVTPEDTGAYYCARDRLQDGNSWSDAFDVWGQGTMVTVSSGGGGSGGGGSGGGGSQSALTQPASVSGSPGQSITISCTGTSSDVGGYNYVSWYQQHPGKAPKLMIYDVSNRPSGVSNRFSGSKSGNTASLTISGLQAEDEADYYCSSYTSSSTPYVFGTGTQLTVLGSHHHHHHHH

SEQ ID NO: 7516 - protein, 496 aa, Artificial Sequence
  source: /note="Description of Artificial Sequence: Synthetic Chimeric Antigen Receptor"
MALPVTALLLPLALLLHAARPQVQLVQSGAEVKKPGASVKVSCKASGYTFTSYDINWVRQATGQGLEWMGWMNPNSGNTGYAQKFQGRVTMTRNTSISTAYMELSSLRSEDTAVYYCARGDSNYWSYYGMDVWGQGTLVTVSSGGGGSGGGGSGGGGSGGGGSQSVLTQPRSVSGSPGQSVTISCTGTSSDVGGYNYVSWYQQHPGEAPKLIIYDADKRPSGISNRFSSGKSGNTASLTISGLQVEDEADYYCCSYAGGSTWVFGGGTKVTVLTTTPAPRPPTPAPTIASQPLSLRPEACRPAAGGAVHTRGLDFACDIYIWAPLAGTCGVLLLSLVITLYCKRGRKKLLYIFKQPFMRPVQTTQEEDGCSCRFPEEEEGGCELRVKFSRSADAPAYKQGQNQLYNELNLGRREEYDVLDKRRGRDPEMGGKPRRKNPQEGLYNELQKDKMAEAYSEIGMKGERRRGKGHDGLYQGLSTATKDTYDALHMQALPPR

SEQ ID NO: 7517 - protein, 490 aa, Artificial Sequence
  source: /note="Description of Artificial Sequence: Synthetic Chimeric Antigen Receptor"
MALPVTALLLPLALLLHAARPQVQLVQSGAEVKKPGASVKVSCKASGYTFTSYGISWVRQAPGQGLEWMGWISAYNGNTNYAQKLQGRVTMTTDTSTSTAYMELRSLRSDDTAVYYCASFSSSDSYDYWGQGTLVTVSSGGGGSGGGGSGGGGSGGGGSEIVLTQSPATLSVSPGERATLSCRASQSVTSNLAWYQQKPGQAPRLLIYAASTRATGIPARFSGSGSGTEFTLTISSMQSEDFAVYFCQQYHTWPPLTFGGGTKVEIKTTTPAPRPPTPAPTIASQPLSLRPEACRPAAGGAVHTRGLDFACDIYIWAPLAGTCGVLLLSLVITLYCKRGRKKLLYIFKQPFMRPVQTTQEEDGCSCRFPEEEEGGCELRVKFSRSADAPAYKQGQNQLYNELNLGRREEYDVLDKRRGRDPEMGGKPRRKNPQEGLYNELQKDKMAEAYSEIGMKGERRRGKGHDGLYQGLSTATKDTYDALHMQALPPR

SEQ ID NO: 7518 - protein, 498 aa, Artificial Sequence
  source: /note="Description of Artificial Sequence: Synthetic Chimeric Antigen Receptor"
MALPVTALLLPLALLLHAARPQVNLRESGPALVKPTQTLTLTCTFSGFSLNTFGMSVSWIRQPPGKALEWLALIDWDDDKYYSTSLRTRLTISKDTAKNQVVLRMTNMDPMDTATYYCARIYGGDRTNTQAPYFFDLWGQGTLVTVSSGGGGSGGGGSGGGGSDVVMTQSPLSLPVTPGEPASISCRSSQSLLHSNGYNYLDWYLQKPGQSPQLLIYLGSNRASGVPDRFSGSGSGTDFTLKISRVEAEDVGVYYCMQALQTPWTFGQGTKLEIKTTTPAPRPPTPAPTIASQPLSLRPEACRPAAGGAVHTRGLDFACDIYIWAPLAGTCGVLLLSLVITLYCKRGRKKLLYIFKQPFMRPVQTTQEEDGCSCRFPEEEEGGCELRVKFSRSADAPAYKQGQNQLYNELNLGRREEYDVLDKRRGRDPEMGGKPRRKNPQEGLYNELQKDKMAEAYSEIGMKGERRRGKGHDGLYQGLSTATKDTYDALHMQALPPR

SEQ ID NO: 7519 - protein, 492 aa, Artificial Sequence
  source: /note="Description of Artificial Sequence: Synthetic Chimeric Antigen Receptor"
MALPVTALLLPLALLLHAARPQVQLQESGPGLVKPSGTLSLTCAVSGASITSRHWWNWVRHSPGKGLEWIGQIYHSGTTTYNPSLGSRVTISVDKSKNQISLELRSVTAADTATYYCVRDYLELATYYGMDVWGQGTTVTVSSGGGGSGGGGSGGGGSEIVLTQSPLSLPVTPGEPASISCRSSQSLLYSDGYNYLDWYLQKPGQSPQLLIYLGSNRASGVPDRFSGSGSGTDFTLQISGVETEDVGVYYCMQALQTQSFGQGTKLEIKTTTPAPRPPTPAPTIASQPLSLRPEACRPAAGGAVHTRGLDFACDIYIWAPLAGTCGVLLLSLVITLYCKRGRKKLLYIFKQPFMRPVQTTQEEDGCSCRFPEEEEGGCELRVKFSRSADAPAYKQGQNQLYNELNLGRREEYDVLDKRRGRDPEMGGKPRRKNPQEGLYNELQKDKMAEAYSEIGMKGERRRGKGHDGLYQGLSTATKDTYDALHMQALPPR

SEQ ID NO: 7520 - protein, 491 aa, Artificial Sequence
  source: /note="Description of Artificial Sequence: Synthetic Chimeric Antigen Receptor"
MALPVTALLLPLALLLHAARPQVQLVQSGAEVKKPGASVKVSCKASGYTFTSYYMHWVRQAPGQGLEWMGIINPSGGSTSYAQKFQGRVTMTRDTSTSTVYMELSSLRSEDTAVYYCARDLAAAGNYYYYGMDVWGQGTTVTVSSGGGGSGGGGSGGGGSSSELTQDPAVSVALGQTARITCQGDSLRSYFTSWYHQKPGQAPVLVIYGNNNRPSGIPDRFSGSSSGNTASLTITGAQAEDEGDYYCDSRDSSGDHLVFGGGTKLTVLTTTPAPRPPTPAPTIASQPLSLRPEACRPAAGGAVHTRGLDFACDIYIWAPLAGTCGVLLLSLVITLYCKRGRKKLLYIFKQPFMRPVQTTQEEDGCSCRFPEEEEGGCELRVKFSRSADAPAYKQGQNQLYNELNLGRREEYDVLDKRRGRDPEMGGKPRRKNPQEGLYNELQKDKMAEAYSEIGMKGERRRGKGHDGLYQGLSTATKDTYDALHMQALPPR

SEQ ID NO: 7521 - protein, 490 aa, Artificial Sequence
  source: /note="Description of Artificial Sequence: Synthetic Chimeric Antigen Receptor"
MALPVTALLLPLALLLHAARPQVQLVQSGAEVKKPGASVKVSCKASGYTFTSYYMHWVRQAPGQGLEWMGIINPSGGSTSYAQKFQGRVTMTRDTSTSTVYMELSSLRSEDTAVYYCARDDDFWSGSGAFDIWGQGTTVTVSSGGGGSGGGGSGGGGSSSELTQDPAVSVALGQTVRITCQGDSLRSYYASWYQQKPGQAPVLVIYGKNNRPSGIPDRFSGSSSGNTASLTITGAQAEDEADYYCNSRDSSGNHPVVFGGGTKLTVLTTTPAPRPPTPAPTIASQPLSLRPEACRPAAGGAVHTRGLDFACDIYIWAPLAGTCGVLLLSLVITLYCKRGRKKLLYIFKQPFMRPVQTTQEEDGCSCRFPEEEEGGCELRVKFSRSADAPAYKQGQNQLYNELNLGRREEYDVLDKRRGRDPEMGGKPRRKNPQEGLYNELQKDKMAEAYSEIGMKGERRRGKGHDGLYQGLSTATKDTYDALHMQALPPR

SEQ ID NO: 7522 - protein, 492 aa, Artificial Sequence
  source: /note="Description of Artificial Sequence: Synthetic Chimeric Antigen Receptor"
MALPVTALLLPLALLLHAARPQVQLVQSGAEVKKPGASVKVSCKASGYTFTSYYMHWVRQAPGQGLEWMGIINPSGGSTSYAQKFQGRVTMTRDTSTSTVYMELSSLRSEDTAVYYCARPEGVSYYDSSVLDYWGQGTLVTVSSGGGGSGGGGSGGGGSQSALTQPASVSGSPGQSITISCTGTSSDVGGYKHVSWYQHHPGKAPKLMIYDVSNRPSGVSNRFSGSKSGNTASLTVSGLQAEDEAHYYCVSYRNFNSLVFGTGTKVTVLTTTPAPRPPTPAPTIASQPLSLRPEACRPAAGGAVHTRGLDFACDIYIWAPLAGTCGVLLLSLVITLYCKRGRKKLLYIFKQPFMRPVQTTQEEDGCSCRFPEEEEGGCELRVKFSRSADAPAYKQGQNQLYNELNLGRREEYDVLDKRRGRDPEMGGKPRRKNPQEGLYNELQKDKMAEAYSEIGMKGERRRGKGHDGLYQGLSTATKDTYDALHMQALPPR

SEQ ID NO: 7523 - protein, 490 aa, Artificial Sequence
  source: /note="Description of Artificial Sequence: Synthetic Chimeric Antigen Receptor"
MALPVTALLLPLALLLHAARPQVQLVQSGAEVKKPGASVKVSCKASGYTFTSYYMHWVRQAPGQGLEWMGIINPSGGSTSYAQKFQGRVTMTRDTSTSTVYMELSSLRAEDTAVYYCARGGYGDYLDAFDIWGQGTTVTVSSGGGGSGGGGSGSGGSQSALTQPASVSGSPGQSITISCTGTSSDVGGYNYVSWYQQHPGKAPKLMIYEVSNRPSGVSNRFSGSKSGNTASLTISGLQAEDEADYYCSSYTSSSTLVFGTGTQLTVLTTTPAPRPPTPAPTIASQPLSLRPEACRPAAGGAVHTRGLDFACDIYIWAPLAGTCGVLLLSLVITLYCKRGRKKLLYIFKQPFMRPVQTTQEEDGCSCRFPEEEEGGCELRVKFSRSADAPAYKQGQNQLYNELNLGRREEYDVLDKRRGRDPEMGGKPRRKNPQEGLYNELQKDKMAEAYSEIGMKGERRRGKGHDGLYQGLSTATKDTYDALHMQALPPR

SEQ ID NO: 7524 - protein, 490 aa, Artificial Sequence
  source: /note="Description of Artificial Sequence: Synthetic Chimeric Antigen Receptor"
MALPVTALLLPLALLLHAARPEVQLVESGGGLVQPGRSLRLSCAASGFTFDDYAMHWVRQAPGKGLEWVSGISWNSGSIGYADSVKGRFTISRDNAKNSLYLQMNSLRAEDTALYYCAKGLSSWHFHDALDIWGQGTMVTVSSGGGGSGGGGSGGGGSSSELTQDPAVSVALGQTVRITCQGDSLRSYYASWYQQKPGQAPVLVIYGKNNRPSGIPDRFSGSSSGNTASLTITGAQAEDEADYYCNSRDSSGNHLWVFGGGTKLTVLTTTPAPRPPTPAPTIASQPLSLRPEACRPAAGGAVHTRGLDFACDIYIWAPLAGTCGVLLLSLVITLYCKRGRKKLLYIFKQPFMRPVQTTQEEDGCSCRFPEEEEGGCELRVKFSRSADAPAYKQGQNQLYNELNLGRREEYDVLDKRRGRDPEMGGKPRRKNPQEGLYNELQKDKMAEAYSEIGMKGERRRGKGHDGLYQGLSTATKDTYDALHMQALPPR

SEQ ID NO: 7525 - protein, 489 aa, Artificial Sequence
  source: /note="Description of Artificial Sequence: Synthetic Chimeric Antigen Receptor"
MALPVTALLLPLALLLHAARPEVQLVESGGGLVQPGRSLRLSCAASGFTFDDYAMHWVRQAPGKGLEWVSGISWNSGSIGYADSVKGRFTISRDNAKNSLYLQMNSLRAEDTALYYCAKDKGGGYYDFWSGSDYWGQGTLVTVSSGGGGSGGGGSGGGGSSSELTQDPAVSVALGQTVRITCQGDSLRSYYASWYQQKPGQAPVLVIYGKNNRPSGIPDRFSGSSSGNTASLTITGAQAEDEADYYCNSRDSSGWVFGGGTKLTVLTTTPAPRPPTPAPTIASQPLSLRPEACRPAAGGAVHTRGLDFACDIYIWAPLAGTCGVLLLSLVITLYCKRGRKKLLYIFKQPFMRPVQTTQEEDGCSCRFPEEEEGGCELRVKFSRSADAPAYKQGQNQLYNELNLGRREEYDVLDKRRGRDPEMGGKPRRKNPQEGLYNELQKDKMAEAYSEIGMKGERRRGKGHDGLYQGLSTATKDTYDALHMQALPPR

SEQ ID NO: 7526 - protein, 498 aa, Artificial Sequence
  source: /note="Description of Artificial Sequence: Synthetic Chimeric Antigen Receptor"
MALPVTALLLPLALLLHAARPEVQLQQSGPGLVKPSQTLSLTCAISGDSVSSNSAAWNWIRQSPSRGLEWLGRTYYRSKWYSDYAVSVKSRITINPDTSKNQFSLQLNSVTPEDTAVYYCARDPYDFWSGYPDAFDIWGQGTMVTVSSGGGGSGGGGSGGGGSQSALTQPASVSGSPGQSITISCTGTSSDVGGYNYVSWYQQHPGKAPKVIISEVNNRPSGVSHRFSGSKSGNTASLTISGLQAEDEADYFCSSYTSGRTLYVFGTGSKVTVLGTTTPAPRPPTPAPTIASQPLSLRPEACRPAAGGAVHTRGLDFACDIYIWAPLAGTCGVLLLSLVITLYCKRGRKKLLYIFKQPFMRPVQTTQEEDGCSCRFPEEEEGGCELRVKFSRSADAPAYKQGQNQLYNELNLGRREEYDVLDKRRGRDPEMGGKPRRKNPQEGLYNELQKDKMAEAYSEIGMKGERRRGKGHDGLYQGLSTATKDTYDALHMQALPPR

SEQ ID NO: 7527 - protein, 491 aa, Artificial Sequence
  source: /note="Description of Artificial Sequence: Synthetic Chimeric Antigen Receptor"
MALPVTALLLPLALLLHAARPEVQLQQSGPGLVKPSLTLSLTCAISGDSVSSNSATWTWIRQSPSRGLEWLGRTYYRSTWYNDYAVSVKSRITINPDTSKNQFSLQLNSVTPEDTAVYYCAREGSGSYYAYWGQGTLVTVSSGGGGSGGGGSGGGGSQSALTQPASVSGSPGQSITISCTGTSSDVGGYNYVSWYQQHPGKAPKLMIYDVSNRPSGVSNRFSGSKSGNTASLTISGLQAEDEADYYCSSYTSSSTLYVFGTGTKVTVLTTTPAPRPPTPAPTIASQPLSLRPEACRPAAGGAVHTRGLDFACDIYIWAPLAGTCGVLLLSLVITLYCKRGRKKLLYIFKQPFMRPVQTTQEEDGCSCRFPEEEEGGCELRVKFSRSADAPAYKQGQNQLYNELNLGRREEYDVLDKRRGRDPEMGGKPRRKNPQEGLYNELQKDKMAEAYSEIGMKGERRRGKGHDGLYQGLSTATKDTYDALHMQALPPR

SEQ ID NO: 7528 - protein, 491 aa, Artificial Sequence
  source: /note="Description of Artificial Sequence: Synthetic Chimeric Antigen Receptor"
MALPVTALLLPLALLLHAARPQVQLVQSGAEVKKPGASVKVSCKASGYTFTGYYMHWVRQAPGQGLEWMGWINPNSGGTNYAQKFQGRVTMTRDTSISTAYMELSRLRSDDTAVYYCARDYWGYYGSGTLDYWGQGTLVTVSSGGGGSGGGGSGGGGSQSALTQPGSVSGSPGQSITISCTGTSSDVGGYNYVSWYQQHPGKAPKLIIYDVSSRPSGVSNRFSGSQSGNTASLTISGLQAEDEADYSCSSYAGSNTLVFGTGTKVTVLTTTPAPRPPTPAPTIASQPLSLRPEACRPAAGGAVHTRGLDFACDIYIWAPLAGTCGVLLLSLVITLYCKRGRKKLLYIFKQPFMRPVQTTQEEDGCSCRFPEEEEGGCELRVKFSRSADAPAYKQGQNQLYNELNLGRREEYDVLDKRRGRDPEMGGKPRRKNPQEGLYNELQKDKMAEAYSEIGMKGERRRGKGHDGLYQGLSTATKDTYDALHMQALPPR

SEQ ID NO: 7529 - protein, 498 aa, Artificial Sequence
  source: /note="Description of Artificial Sequence: Synthetic Chimeric Antigen Receptor"
MALPVTALLLPLALLLHAARPQVQLVQSGAEVKKPGASVKVSCKASGYTFTSYGISWVRQAPGQGLEWMGWISAYNGNTNYAQKLQGRVTMTTDTSTSTAYMELRSLRSDDTAVYYCARAGLALYSNYVPYYYYGMDVWGQGTTVTVSSGGGGSGGGGSGGGGSNFMLTQPHSVSESPGKTVTISCTRSSGSIASNYVQWYQQRPGSSPTTVIYEDNQRPSGVPDRFSGSIDSSSNSASLTISGLKTEDEADYYCQSYDSSNPWVFGGGTKLTVLTTTPAPRPPTPAPTIASQPLSLRPEACRPAAGGAVHTRGLDFACDIYIWAPLAGTCGVLLLSLVITLYCKRGRKKLLYIFKQPFMRPVQTTQEEDGCSCRFPEEEEGGCELRVKFSRSADAPAYKQGQNQLYNELNLGRREEYDVLDKRRGRDPEMGGKPRRKNPQEGLYNELQKDKMAEAYSEIGMKGERRRGKGHDGLYQGLSTATKDTYDALHMQALPPR

SEQ ID NO: 7530 - protein, 485 aa, Artificial Sequence
  source: /note="Description of Artificial Sequence: Synthetic Chimeric Antigen Receptor"
MALPVTALLLPLALLLHAARPEVQLVESGGGLVKPGGSLRLSCVASGFTFSNAWMNWVRQAPGKGLEWVGRIKSKTDGGTADYAAPVKGRFTISRDDSKNTMYLQMNSLKTEDTGVYYCITGATDVWGQGTTVTVSSGGGGSGGGGSGGGGSSYVLTQPPSASGTPGQRVTISCSGSSSNIGSNYVYWYQQLPGTAPKLLIYRNNQRPSGVPDRFSGSKSGTSASLAISGLRSEDEADYYCAAWDDSLSGPVFGGGTKLTVLTTTPAPRPPTPAPTIASQPLSLRPEACRPAAGGAVHTRGLDFACDIYIWAPLAGTCGVLLLSLVITLYCKRGRKKLLYIFKQPFMRPVQTTQEEDGCSCRFPEEEEGGCELRVKFSRSADAPAYKQGQNQLYNELNLGRREEYDVLDKRRGRDPEMGGKPRRKNPQEGLYNELQKDKMAEAYSEIGMKGERRRGKGHDGLYQGLSTATKDTYDALHMQALPPR

SEQ ID NO: 7531 - protein, 525 aa, Artificial Sequence
  source: /note="Description of Artificial Sequence: Synthetic Chimeric Antigen Receptor"
MALPVTALLLPLALLLHAARPDIQMTQSPSSLSASVGDRVTITCSASSSVSYMNWYQQTPGKAPKRWIYDTSKLASGVPSRFSGSGSGTDYTFTISSLQPEDIATYYCQQWSSNPFTFGQGTKLQIGGGGSGGGGSGGGGSQVQLVQSGGGVVQPGRSLRLSCKASGYTFTRYTMHWVRQAPGKGLEWIGYINPSRGYTNYNQKVKDRFTISRDNSKNTAFLQMDSLRPEDTGVYFCARYYDDHYCLDYWGQGTPVTVSSTTTPAPRPPTPAPTIASQPLSLRPEACRPAAGGAVHTRGLDFACDIYIWAPLAGTCGVLLLSLVITLYCRSKRSRLLHSDYMNMTPRRPGPTRKHYQPYAPPRDFAAYRSKRGRKKLLYIFKQPFMRPVQTTQEEDGCSCRFPEEEEGGCELRVKFSRSADAPAYQQGQNQLYNELNLGRREEYDVLDKRRGRDPEMGGKPQRRKNPQEGLYNELQKDKMAEAYSEIGMKGERRRGKGHDGLYQGLSTATKDTYDALHMQALPPR

SEQ ID NO: 7532 - protein, 792 aa, Artificial Sequence
  source: /note="Description of Artificial Sequence: Synthetic Chimeric Antigen Receptor"
MVLLVTSLLLCELPHPAFLLIPDTEVQLVESGGGLVKPGGSLKLSCAASGFAFSIYDMSWVRQTPEKRLEWVAYISSGGGTYYPDTVKGRFTISRDNAKNTLYLQMSSLKSEDTAMYYCARHSGYGTHWGVLFAYWGQGTLVTVSAGGGGSGGGGSGGGGSDIQMTQTTSSLSASLGDRVTISCRASQDISNYLNWYQQKPDGTVKLLIYYTSILHSGVPSRFSGSGSGTDYSLTISNLEQEDFATYFCQQGNTLPWTFGGGTKLEIKAEPKSCDKTHTCPPCPAPELLGGPSVFLFPPKPKDTLMISRTPEVTCVVVDVSHEDPEVKFNWYVDGVEVHNAKTKPREEQYNSTYRVVSVLTVLHQDWLNGKEYKCKVSNKALPAPIEKTISKAKGQPREPQVYTLPPSRDELTKNQVSLTCLVKGFYPSDIAVEWESNGQPENNYKTTPPVLDSDGSFFLYSKLTVDKSRWQQGNVFSCSVMHEALHNHYTQKSLSLSPGKKDPKAAAAFVPVFLPAKPTTTPAPRPPTPAPTIASQPLSLRPEACRPAAGGAVHTRGLDFACDIYIWAPLAGTCGVLLLSLVITLYCNHRNRSKRSRLLHSDYMNMTPRRPGPTRKHYQPYAPPRDFAAYRSRFSVVKRGRKKLLYIFKQPFMRPVQTTQEEDGCSCRFPEEEEGGCELRVKFSRSADAPAYQQGQNQLYNELNLGRREEYDVLDKRRGRDPEMGGKPRRKNPQEGLYNELQKDKMAEAYSEIGMKGERRRGKGHDGLYQGLSTATKDTYDALHMQALPPR

SEQ ID NO: 7533 - protein, 506 aa, Artificial Sequence
  source: /note="Description of Artificial Sequence: Synthetic Chimeric Antigen Receptor"
MVLLVTSLLLCELPHPAFLLIPDTEVQLVESGGGLVKPGGSLKLSCAASGFAFSIYDMSWVRQTPEKRLEWVAYISSGGGTYYPDTVKGRFTISRDNAKNTLYLQMSSLKSEDTAMYYCARHSGYGTHWGVLFAYWGQGTLVTVSAGGGGSGGGGSGGGGSDIQMTQTTSSLSASLGDRVTISCRASQDISNYLNWYQQKPDGTVKLLIYYTSILHSGVPSRFSGSGSGTDYSLTISNLEQEDFATYFCQQGNTLPWTFGGGTKLEIKAKTTPPSVYGRVKDPKAAAIEVMYPPPYLDNEKSNGTIIHVKGKHLCPSPLFPGPSKPFWVLVVVGGVLACYSLLVTVAFIIFWVRSKRSRLLHSDYMNMTPRRPGPTRKHYQPYAPPRDFAAYRSRVKFSRSADAPAYQQGQNQLYNELNLGRREEYDVLDKRRGRDPEMGGKPRRKNPQEGLYNELQKDKMAEAYSEIGMKGERRRGKGHDGLYQGLSTATKDTYDALHMQALPPR

SEQ ID NO: 7534 - protein, 571 aa, Artificial Sequence
  source: /note="Description of Artificial Sequence: Synthetic Chimeric Antigen Receptor"
MVLLVTSLLLCELPHPAFLLIPDTEVQLVESGGGLVKPGGSLKLSCAASGFAFSIYDMSWVRQTPEKRLEWVAYISSGGGTYYPDTVKGRFTISRDNAKNTLYLQMSSLKSEDTAMYYCARHSGYGTHWGVLFAYWGQGTLVTVSAGGGGSGGGGSGGGGSDIQMTQTTSSLSASLGDRVTISCRASQDISNYLNWYQQKPDGTVKLLIYYTSILHSGVPSRFSGSGSGTDYSLTISNLEQEDFATYFCQQGNTLPWTFGGGTKLEIKAKTTPPSVYGRVKDPKAAAAFVPVFLPAKPTTTPAPRPPTPAPTIASQPLSLRPEACRPAAGGAVHTRGLDFACDIYIWAPLAGTCGVLLLSLVITLYCNHRNRSKRSRLLHSDYMNMTPRRPGPTRKHYQPYAPPRDFAAYRSRFSVVKRGRKKLLYIFKQPFMRPVQTTQEEDGCSCRFPEEEEGGCELRVKFSRSADAPAYQQGQNQLYNELNLGRREEYDVLDKRRGRDPEMGGKPRRKNPQEGLYNELQKDKMAEAYSEIGMKGERRRGKGHDGLYQGLSTATKDTYDALHMQALPPR

SEQ ID NO: 7535 - protein, 727 aa, Artificial Sequence
  source: /note="Description of Artificial Sequence: Synthetic Chimeric Antigen Receptor"
MVLLVTSLLLCELPHPAFLLIPDTEVQLVESGGGLVKPGGSLKLSCAASGFAFSIYDMSWVRQTPEKRLEWVAYISSGGGTYYPDTVKGRFTISRDNAKNTLYLQMSSLKSEDTAMYYCARHSGYGSSYGVLFAYWGQGTLVTVSAGGGGSGGGGSGGGGSDIQMTQTTSSLSASLGDRVTISCRASQDISNYLNWYQQKPDGTVKLLIYYTSILHSGVPSRFSGSGSGTDYSLTISNLEQEDFATYFCQQGNTLPWTFGGGTKLEIKAEPKSCDKTHTCPPCPAPELLGGPSVFLFPPKPKDTLMISRTPEVTCVVVDVSHEDPEVKFNWYVDGVEVHNAKTKPREEQYNSTYRVVSVLTVLHQDWLNGKEYKCKVSNKALPAPIEKTISKAKGQPREPQVYTLPPSRDELTKNQVSLTCLVKGFYPSDIAVEWESNGQPENNYKTTPPVLDSDGSFFLYSKLTVDKSRWQQGNVFSCSVMHEALHNHYTQKSLSLSPGKKDPKAAAIEVMYPPPYLDNEKSNGTIIHVKGKHLCPSPLFPGPSKPFWVLVVVGGVLACYSLLVTVAFIIFWVRSKRSRLLHSDYMNMTPRRPGPTRKHYQPYAPPRDFAAYRSRVKFSRSADAPAYQQGQNQLYNELNLGRREEYDVLDKRRGRDPEMGGKPRRKNPQEGLYNELQKDKMAEAYSEIGMKGERRRGKGHDGLYQGLSTATKDTYDALHMQALPPR

SEQ ID NO: 7536 - protein, 792 aa, Artificial Sequence [sequence omitted]

SEQ ID NO: 7537 - protein, 511 aa, Artificial Sequence
  source: /note="Description of Artificial Sequence: Synthetic Chimeric Antigen Receptor"
MVLLVTSLLLCELPHPAFLLIPDTEVQLVESGGGLVKPGGSLKLSCAASGFAFSIYDMSWVRQTPEKRLEWVAYISSGGGTYYPDTVKGRFTISRDNAKNTLYLQMSSLKSEDTAMYYCARHSGYGTHWGVLFAYWGQGTLVTVSAGGGGSGGGGSGGGGSDIQMTQTTSSLSASLGDRVTISCRASQDISNYLNWYQQKPDGTVKLLIYYTSILHSGVPSRFSGSGSGTDYSLTISNLEQEDFATYFCQQGNTLPWTFGGGTKLEIKAKTTPPSVYGRVKDPKAAAATTTPAPRPPTPAPTIASQPLSLRPEACRPAAGGAVHTRGLDFACDIYIWAPLAGTCGVLLLSLVITLYCKRGRKKLLYIFKQPFMRPVQTTQEEDGCSCRFPEEEEGGCELRVKFSRSADAPAYKQGQNQLYNELNLGRREEYDVLDKRRGRDPEMGGKPRRKNPQEGLYNELQKDKMAEAYSEIGMKGERRRGKGHDGLYQGLSTATKDTYDALHMQALPPR

SEQ ID NO: 7538 - protein, 484 aa, Artificial Sequence
  source: /note="Description of Artificial Sequence: Synthetic Chimeric Antigen Receptor"
MLLLVTSLLLCELPHPAFLLIPQVQLQQSGPGLVKPSQTLSLTCAISGDSVSSNSAAWNWIRQSPSRGLEWLGRTYYRSKWYNDYAVSVKSRITINPDTSKNQFSLQLNSVTPEDTAVYYCAREVTGDLEDAFDIWGQGTMVTVSSGGGGSDIQMTQSPSSLSASVGDRVTITCRASQTIWSYLNWYQQRPGKAPNLLIYAASSLQSGVPSRFSGRGSGTDFTLTISSLQAEDFATYYCQQSYSIPQTFGQGTKLEIKAAATTTPAPRPPTPAPTIASQPLSLRPEACRPAAGGAVHTRGLDFACDIYIWAPLAGTCGVLLLSLVITLYCKRGRKKLLYIFKQPFMRPVQTTQEEDGCSCRFPEEEEGGCELRVKFSRSADAPAYKQGQNQLYNELNLGRREEYDVLDKRRGRDPEMGGKPRRKNPQEGLYNELQKDKMAEAYSEIGMKGERRRGKGHDGLYQGLSTATKDTYDALHMQALPPR

SEQ ID NO: 7539 - protein, 480 aa, Artificial Sequence
  source: /note="Description of Artificial Sequence: Synthetic Chimeric Antigen Receptor"
MLLLVTSLLLCELPHPAFLLIPQVQLQQSGPGLVKPSQTLSLTCAISGDSVSSNSAAWNWIRQSPSRGLEWLGRTYYRSKWYNDYAVSVKSRITINPDTSKNQFSLQLNSVTPEDTAVYYCAREVTGDLEDAFDIWGQGTMVTVSSGGGGSDIQMTQSPSSLSASVGDRVTITCRASQTIWSYLNWYQQRPGKAPNLLIYAASSLQSGVPSRFSGRGSGTDFTLTISSLQAEDFATYYCQQSYSIPQTFGQGTKLEIKAAAIEVMYPPPYLDNEKSNGTIIHVKGKHLCPSPLFPGPSKPFWVLVVVGGVLACYSLLVTVAFIIFWVRSKRSRLLHSDYMNMTPRRPGPTRKHYQPYAPPRDFAAYRSRVKFSRSADAPAYQQGQNQLYNELNLGRREEYDVLDKRRGRDPEMGGKPRRKNPQEGLYNELQKDKMAEAYSEIGMKGERRRGKGHDGLYQGLSTATKDTYDALHMQALPPR

SEQ ID NO: 7540 - protein, 544 aa, Artificial Sequence
  source: /note="Description of Artificial Sequence: Synthetic Chimeric Antigen Receptor"
MLLLVTSLLLCELPHPAFLLIPQVQLQQSGPGLVKPSQTLSLTCAISGDSVSSNSAAWNWIRQSPSRGLEWLGRTYYRSKWYNDYAVSVKSRITINPDTSKNQFSLQLNSVTPEDTAVYYCAREVTGDLEDAFDIWGQGTMVTVSSGGGGSDIQMTQSPSSLSASVGDRVTITCRASQTIWSYLNWYQQRPGKAPNLLIYAASSLQSGVPSRFSGRGSGTDFTLTISSLQAEDFATYYCQQSYSIPQTFGQGTKLEIKAAAFVPVFLPAKPTTTPAPRPPTPAPTIASQPLSLRPEACRPAAGGAVHTRGLDFACDIYIWAPLAGTCGVLLLSLVITLYCNHRNRSKRSRLLHSDYMNMTPRRPGPTRKHYQPYAPPRDFAAYRSRFSVVKRGRKKLLYIFKQPFMRPVQTTQEEDGCSCRFPEEEEGGCELRVKFSRSADAPAYQQGQNQLYNELNLGRREEYDVLDKRRGRDPEMGGKPRRKNPQEGLYNELQKDKMAEAYSEIGMKGERRRGKGHDGLYQGLSTATKDTYDALHMQALPPR

SEQ ID NO: 7541 - protein, 711 aa, Artificial Sequence
  source: /note="Description of Artificial Sequence: Synthetic Chimeric Antigen Receptor"
DIQMTQTTSSLSASLGDRVTISCRASQDISKYLNWYQQKPDGTVKLLIYHTSRLHSGVPSRFSGSGSGTDYSLTISNLEQEDIATYFCQQGNTLPYTFGGGTKLEITGGGGSQVQLQQSGPGLVKPSQTLSLTCAISGDSVSSNSAAWNWIRQSPSRGLEWLGRTYYRSKWYNDYAVSVKSRITINPDTSKNQFSLQLNSVTPEDTAVYYCAREVTGDLEDAFDIWGQGTMVTVSSGSTSGSGKPGSGEGSTKGDIQMTQSPSSLSASVGDRVTITCRASQTIWSYLNWYQQRPGKAPNLLIYAASSLQSGVPSRFSGRGSGTDFTLTISSLQAEDFATYYCQQSYSIPQTFGQGTKLEIKGGGGSEVKLQESGPGLVAPSQSLSVTCTVSGVSLPDYGVSWIRQPPRKGLEWLGVIWGSETTYYNSALKSRLTIIKDNSKSQVFLKMNSLQTDDTAIYYCAKHYYYGGSYAMDYWGQGTSVTVSSSGTTTPAPRPPTPAPTIASQPLSLRPEACRPAAGGAVHTRGLDFACDIYIWAPLAGTCGVLLLSLVITLYCKRGRKKLLYIFKQPFMRPVQTTQEEDGCSCRFPEEEEGGCELRVKFSRSADAPAYKQGQNQLYNELNLGRREEYDVLDKRRGRDPEMGGKPRRKNPQEGLYNELQKDKMAEAYSEIGMKGERRRGKGHDGLYQGLSTATKDTYDALHMQALPPR

SEQ ID NO: 7542 - protein, 729 aa, Artificial Sequence
  source: /note="Description of Artificial Sequence: Synthetic Chimeric Antigen Receptor"
QVQLQQSGPGLVKPSQTLSLTCAISGDSVSSNSAAWNWIRQSPSRGLEWLGRTYYRSKWYNDYAVSVKSRITINPDTSKNQFSLQLNSVTPEDTAVYYCAREVTGDLEDAFDIWGQGTMVTVSSGGGGSDIQMTQSPSSLSASVGDRVTITCRASQTIWSYLNWYQQRPGKAPNLLIYAASSLQSGVPSRFSGRGSGTDFTLTISSLQAEDFATYYCQQSYSIPQTFGQGTKLEIKGGGGSGGGGSGGGGSGGGGSGGGGSDIQMTQTTSSLSASLGDRVTISCRASQDISKYLNWYQQKPDGTVKLLIYHTSRLHSGVPSRFSGSGSGTDYSLTISNLEQEDIATYFCQQGNTLPYTFGGGTKLEITGSTSGSGKPGSGEGSTKGEVKLQESGPGLVAPSQSLSVTCTVSGVSLPDYGVSWIRQPPRKGLEWLGVIWGSETTYYNSALKSRLTIIKDNSKSQVFLKMNSLQTDDTAIYYCAKHYYYGGSYAMDYWGQGTSVTVSSTTTPAPRPPTPAPTIASQPLSLRPEACRPAAGGAVHTRGLDFACDIYIWAPLAGTCGVLLLSLVITLYCKRGRKKLLYIFKQPFMRPVQTTQEEDGCSCRFPEEEEGGCELRVKFSRSADAPAYKQGQNQLYNELNLGRREEYDVLDKRRGRDPEMGGKPRRKNPQEGLYNELQKDKMAEAYSEIGMKGERRRGKGHDGLYQGLSTATKDTYDALHMQALPPR

SEQ ID NO: 7543 - protein, 737 aa, Artificial Sequence
  source: /note="Description of Artificial Sequence: Synthetic Chimeric Antigen Receptor"
EVQLQQSGPGLVKPSQTLSLTCAISGDSVSSNSAAWNWIRQSPSRGLEWLGRTYYRSKWYNDYAVSVKSRITINPDTSKNQFSLQLNSVTPEDTAVYYCARDLGWIAVAGTFDYWGQGTLVTVSSGGGGSGGGGSGGGGSQSALTQPASVSGSPGQSITISCTGTSSDVGGYNYVSWYQQHPGKAPKLMIYDVSKRPSGVSNRFSGSKSGNTASLTISGLQAEDEADYYCSSYTSSSLNHVFGTGTKVTVLTGGGGSGGGGSGGGGSGGGGSEIVMTQSPATLSLSPGERATLSCRASQDISKYLNWYQQKPGQAPRLLIYHTSRLHSGIPARFSGSGSGTDYTLTISSLQPEDFAVYFCQQGNTLPYTFGQGTKLEIKGGGGSGGGGSGGGGSQVQLQESGPGLVKPSETLSLTCTVSGVSLPDYGVSWIRQPPGKGLEWIGVIWGSETTYYQSSLKSRVTISKDNSKNQVSLKLSSVTAADTAVYYCAKHYYYGGSYAMDYWGQGTLVTVSSTTTPAPRPPTPAPTIASQPLSLRPEACRPAAGGAVHTRGLDFACDIYIWAPLAGTCGVLLLSLVITLYCKRGRKKLLYIFKQPFMRPVQTTQEEDGCSCRFPEEEEGGCELRVKFSRSADAPAYKQGQNQLYNELNLGRREEYDVLDKRRGRDPEMGGKPRRKNPQEGLYNELQKDKMAEAYSEIGMKGERRRGKGHDGLYQGLSTATKDTYDALHMQALPPR

SEQ ID NO: 7544 - protein, 703 aa, Artificial Sequence
  source: /note="Description of Artificial Sequence: Synthetic Chimeric Antigen Receptor"
QVQLQQSGAEVKKPGSSVKVSCKASGGTFSSYAISWVRQAPGQGLEWMGGIIPILGIANYAQKFQGRVTITADESTSTAYMELSSLRSEDTAVYYCATGGSGRYALDIWGQGTMVTVSSGGGGSGGGGSGGGGSEIVLTQSPATLSLSPGERATLSCRASQSVSSYLAWYQQKPGQAPRLLIYDASNRATGIPARFSGSGSGTDFTLTISSLEPEDFAVYYCQQRSNWPPSYTFGQGTKLEIKRAEPKSCDKTHTCPPCPAPELLGGPSVFLFPPKPKDTLMISRTPEVTCVVVDVSHEDPEVKFNWYVDGVEVHNAKTKPREEQYNSTYRVVSVLTVLHQDWLNGKEYKCKVSNKALPAPIEKTISKAKGQPREPQVYTLPPSRDELTKNQVSLTCLVKGFYPSDIAVEWESNGQPENNYKTTPPVLDSDGSFFLYSKLTVDKSRWQQGNVFSCSVMHEALHNHYTQKSLSLSPGKKDPKAAAIEVMYPPPYLDNEKSNGTIIHVKGKHLCPSPLFPGPSKPFWVLVVVGGVLACYSLLVTVAFIIFWVRSKRSRLLHSDYMNMTPRRPGPTRKHYQPYAPPRDFAAYRSRVKFSRSADAPAYQQGQNQLYNELNLGRREEYDVLDKRRGRDPEMGGKPRRKNPQEGLYNELQKDKMAEAYSEIGMKGERRRGKGHDGLYQGLSTATKDTYDALHMQALPPR

SEQ ID NO: 7545 - protein, 707 aa, Artificial Sequence
  source: /note="Description of Artificial Sequence: Synthetic Chimeric Antigen Receptor"
QVQLQQSGAEVKKPGSSVKVSCKASGGTFSSYAISWVRQAPGQGLEWMGGIIPILGIANYAQKFQGRVTITADESTSTAYMELSSLRSEDTAVYYCATGGSGRYALDIWGQGTMVTVSSGGGGSGGGGSGGGGSEIVLTQSPATLSLSPGERATLSCRASQSVSSYLAWYQQKPGQAPRLLIYDASNRATGIPARFSGSGSGTDFTLTISSLEPEDFAVYYCQQRSNWPPSYTFGQGTKLEIKRAEPKSCDKTHTCPPCPAPELLGGPSVFLFPPKPKDTLMISRTPEVTCVVVDVSHEDPEVKFNWYVDGVEVHNAKTKPREEQYNSTYRVVSVLTVLHQDWLNGKEYKCKVSNKALPAPIEKTISKAKGQPREPQVYTLPPSRDELTKNQVSLTCLVKGFYPSDIAVEWESNGQPENNYKTTPPVLDSDGSFFLYSKLTVDKSRWQQGNVFSCSVMHEALHNHYTQKSLSLSPGKKDPKAAATTTPAPRPPTPAPTIASQPLSLRPEACRPAAGGAVHTRGLDFACDIYIWAPLAGTCGVLLLSLVITLYCKRGRKKLLYIFKQPFMRPVQTTQEEDGCSCRFPEEEEGGCELRVKFSRSADAPAYKQGQNQLYNELNLGRREEYDVLDKRRGRDPEMGGKPRRKNPQEGLYNELQKDKMAEAYSEIGMKGERRRGKGHDGLYQGLSTATKDTYDALHMQALPPR

SEQ ID NO: 7546 - protein, 767 aa, Artificial Sequence
  source: /note="Description of Artificial Sequence: Synthetic Chimeric Antigen Receptor"
QVQLQQSGAEVKKPGSSVKVSCKASGGTFSSYAISWVRQAPGQGLEWMGGIIPILGIANYAQKFQGRVTITADESTSTAYMELSSLRSEDTAVYYCATGGSGRYALDIWGQGTMVTVSSGGGGSGGGGSGGGGSEIVLTQSPATLSLSPGERATLSCRASQSVSSYLAWYQQKPGQAPRLLIYDASNRATGIPARFSGSGSGTDFTLTISSLEPEDFAVYYCQQRSNWPPSYTFGQGTKLEIKRAEPKSCDKTHTCPPCPAPELLGGPSVFLFPPKPKDTLMISRTPEVTCVVVDVSHEDPEVKFNWYVDGVEVHNAKTKPREEQYNSTYRVVSVLTVLHQDWLNGKEYKCKVSNKALPAPIEKTISKAKGQPREPQVYTLPPSRDELTKNQVSLTCLVKGFYPSDIAVEWESNGQPENNYKTTPPVLDSDGSFFLYSKLTVDKSRWQQGNVFSCSVMHEALHNHYTQKSLSLSPGKKDPKAAAFVPVFLPAKPTTTPAPRPPTPAPTIASQPLSLRPEACRPAAGGAVHTRGLDFACDIYIWAPLAGTCGVLLLSLVITLYCNHRNRSKRSRLLHSDYMNMTPRRPGPTRKHYQPYAPPRDFAAYRSRFSVVKRGRKKLLYIFKQPFMRPVQTTQEEDGCSCRFPEEEEGGCELRVKFSRSADAPAYQQGQNQLYNELNLGRREEYDVLDKRRGRDPEMGGKPRRKNPQEGLYNELQKDKMAEAYSEIGMKGERRRGKGHDGLYQGLSTATKDTYDALHMQALPPR

SEQ ID NO: 7547 - protein, 714 aa, Artificial Sequence
  source: /note="Description of Artificial Sequence: Synthetic Chimeric Antigen Receptor"
QVQLQQSGAEVKKPGSSVKVSCKASGGTFSSYAISWVRQAPGQGLEWMGGIIPILGIANYAQKFQGRVTITADESTSTAYMELSSLRSEDTAVYYCARGGAGGSGSYYPLIWGQGTTVTVSSGGGGSGGGGSGGGGSEIVLTQSPATLSLSPGERATLSCGASQSVSSSYLAWYQQKPGQAPRLLIYDASSRATGIPARFSGSGSGTDFTLTISSLEPEDFAVYYCQQRSSWPPTWTFGQGTKLEIKRAEPKSCDKTHTCPPCPAPELLGGPSVFLFPPKPKDTLMISRTPEVTCVVVDVSHEDPEVKFNWYVDGVEVHNAKTKPREEQYNSTYRVVSVLTVLHQDWLNGKEYKCKVSNKALPAPIEKTISKAKGQPREPQVYTLPPSRDELTKNQVSLTCLVKGFYPSDIAVEWESNGQPENNYKTTPPVLDSDGSFFLYSKLTVDKSRWQQGNVFSCSVMHEALHNHYTQKSLSLSPGKKDPKAAAIEGAAAAIEVMYPPPYLDNEKSNGTIIHVKGKHLCPSPLFPGPSKPFWVLVVVGGVLACYSLLVTVAFIIFWVRSKRSRLLHSDYMNMTPRRPGPTRKHYQPYAPPRDFAAYRSRVKFSRSADAPAYQQGQNQLYNELNLGRREEYDVLDKRRGRDPEMGGKPRRKNPQEGLYNELQKDKMAEAYSEIGMKGERRRGKGHDGLYQGLSTATKDTYDALHMQALPPR

SEQ ID NO: 7548 - protein, 711 aa, Artificial Sequence
  source: /note="Description of Artificial Sequence: Synthetic Chimeric Antigen Receptor"
QVQLQQSGAEVKKPGSSVKVSCKASGGTFSSYAISWVRQAPGQGLEWMGGIIPILGIANYAQKFQGRVTITADESTSTAYMELSSLRSEDTAVYYCARGGAGGSGSYYPLIWGQGTTVTVSSGGGGSGGGGSGGGGSEIVLTQSPATLSLSPGERATLSCGASQSVSSSYLAWYQQKPGQAPRLLIYDASSRATGIPARFSGSGSGTDFTLTISSLEPEDFAVYYCQQRSSWPPTWTFGQGTKLEIKRAEPKSCDKTHTCPPCPAPELLGGPSVFLFPPKPKDTLMISRTPEVTCVVVDVSHEDPEVKFNWYVDGVEVHNAKTKPREEQYNSTYRVVSVLTVLHQDWLNGKEYKCKVSNKALPAPIEKTISKAKGQPREPQVYTLPPSRDELTKNQVSLTCLVKGFYPSDIAVEWESNGQPENNYKTTPPVLDSDGSFFLYSKLTVDKSRWQQGNVFSCSVMHEALHNHYTQKSLSLSPGKKDPKAAATTTPAPRPPTPAPTIASQPLSLRPEACRPAAGGAVHTRGLDFACDIYIWAPLAGTCGVLLLSLVITLYCKRGRKKLLYIFKQPFMRPVQTTQEEDGCSCRFPEEEEGGCELRVKFSRSADAPAYKQGQNQLYNELNLGRREEYDVLDKRRGRDPEMGGKPRRKNPQEGLYNELQKDKMAEAYSEIGMKGERRRGKGHDGLYQGLSTATKDTYDALHMQALPPR

SEQ ID NO: 7549 - protein, 771 aa, Artificial Sequence
  source: /note="Description of Artificial Sequence: Synthetic Chimeric Antigen Receptor"
QVQLQQSGAEVKKPGSSVKVSCKASGGTFSSYAISWVRQAPGQGLEWMGGIIPILGIANYAQKFQGRVTITADESTSTAYMELSSLRSEDTAVYYCARGGAGGSGSYYPLIWGQGTTVTVSSGGGGSGGGGSGGGGSEIVLTQSPATLSLSPGERATLSCGASQSVSSSYLAWYQQKPGQAPRLLIYDASSRATGIPARFSGSGSGTDFTLTISSLEPEDFAVYYCQQRSSWPPTWTFGQGTKLEIKRAEPKSCDKTHTCPPCPAPELLGGPSVFLFPPKPKDTLMISRTPEVTCVVVDVSHEDPEVKFNWYVDGVEVHNAKTKPREEQYNSTYRVVSVLTVLHQDWLNGKEYKCKVSNKALPAPIEKTISKAKGQPREPQVYTLPPSRDELTKNQVSLTCLVKGFYPSDIAVEWESNGQPENNYKTTPPVLDSDGSFFLYSKLTVDKSRWQQGNVFSCSVMHEALHNHYTQKSLSLSPGKKDPKAAAFVPVFLPAKPTTTPAPRPPTPAPTIASQPLSLRPEACRPAAGGAVHTRGLDFACDIYIWAPLAGTCGVLLLSLVITLYCNHRNRSKRSRLLHSDYMNMTPRRPGPTRKHYQPYAPPRDFAAYRSRFSVVKRGRKKLLYIFKQPFMRPVQTTQEEDGCSCRFPEEEEGGCELRVKFSRSADAPAYQQGQNQLYNELNLGRREEYDVLDKRRGRDPEMGGKPRRKNPQEGLYNELQKDKMAEAYSEIGMKGERRRGKGHDGLYQGLSTATKDTYDALHMQALPPR

SEQ ID NO: 7550 - protein, 701 aa, Artificial Sequence
  source: /note="Description of Artificial Sequence: Synthetic Chimeric Antigen Receptor"
QVQLVQSGAEVKKPGSSVKVSCKASGGTFSSYAISWVRQAPGQGLEWMGGIIPILGTANYAQKFQGRVTITADESTSTAYMELSSLRSEDTAVYYCARWGGGAFDIWGQGTMVTVSSGGGGSGGGGSGGGGSEIVLTQSPGTLSLSPGERATLSCRASQSVGGYLAWYQQKPGQAPRLLIYDASNRATGIPARFSGSGSGTDFTLTISSLEPEDFAVYYCQQRNNWPPMYTFGQGTKLEIKRAEPKSCDKTHTCPPCPAPELLGGPSVFLFPPKPKDTLMISRTPEVTCVVVDVSHEDPEVKFNWYVDGVEVHNAKTKPREEQYNSTYRVVSVLTVLHQDWLNGKEYKCKVSNKALPAPIEKTISKAKGQPREPQVYTLPPSRDELTKNQVSLTCLVKGFYPSDIAVEWESNGQPENNYKTTPPVLDSDGSFFLYSKLTVDKSRWQQGNVFSCSVMHEALHNHYTQKSLSLSPGKKDPKAAAIEVMYPPPYLDNEKSNGTIIHVKGKHLCPSPLFPGPSKPFWVLVVVGGVLACYSLLVTVAFIIFWVRSKRSRLLHSDYMNMTPRRPGPTRKHYQPYAPPRDFAAYRSRVKFSRSADAPAYQQGQNQLYNELNLGRREEYDVLDKRRGRDPEMGGKPRRKNPQEGLYNELQKDKMAEAYSEIGMKGERRRGKGHDGLYQGLSTATKDTYDALHMQALPPR

SEQ ID NO: 7551 - protein, 705 aa, Artificial Sequence
  source: /note="Description of Artificial Sequence: Synthetic Chimeric Antigen Receptor"
QVQLVQSGAEVKKPGSSVKVSCKASGGTFSSYAISWVRQAPGQGLEWMGGIIPILGTANYAQKFQGRVTITADESTSTAYMELSSLRSEDTAVYYCARWGGGAFDIWGQGTMVTVSSGGGGSGGGGSGGGGSEIVLTQSPGTLSLSPGERATLSCRASQSVGGYLAWYQQKPGQAPRLLIYDASNRATGIPARFSGSGSGTDFTLTISSLEPEDFAVYYCQQRNNWPPMYTFGQGTKLEIKRAEPKSCDKTHTCPPCPAPELLGGPSVFLFPPKPKDTLMISRTPEVTCVVVDVSHEDPEVKFNWYVDGVEVHNAKTKPREEQYNSTYRVVSVLTVLHQDWLNGKEYKCKVSNKALPAPIEKTISKAKGQPREPQVYTLPPSRDELTKNQVSLTCLVKGFYPSDIAVEWESNGQPENNYKTTPPVLDSDGSFFLYSKLTVDKSRWQQGNVFSCSVMHEALHNHYTQKSLSLSPGKKDPKAAATTTPAPRPPTPAPTIASQPLSLRPEACRPAAGGAVHTRGLDFACDIYIWAPLAGTCGVLLLSLVITLYCKRGRKKLLYIFKQPFMRPVQTTQEEDGCSCRFPEEEEGGCELRVKFSRSADAPAYKQGQNQLYNELNLGRREEYDVLDKRRGRDPEMGGKPRRKNPQEGLYNELQKDKMAEAYSEIGMKGERRRGKGHDGLYQGLSTATKDTYDALHMQALPPR

SEQ ID NO: 7552 - protein, 765 aa, Artificial Sequence
  source: /note="Description of Artificial Sequence: Synthetic Chimeric Antigen Receptor"
QVQLVQSGAEVKKPGSSVKVSCKASGGTFSSYAISWVRQAPGQGLEWMGGIIPILGTANYAQKFQGRVTITADESTSTAYMELSSLRSEDTAVYYCARWGGGAFDIWGQGTMVTVSSGGGGSGGGGSGGGGSEIVLTQSPGTLSLSPGERATLSCRASQSVGGYLAWYQQKPGQAPRLLIYDASNRATGIPARFSGSGSGTDFTLTISSLEPEDFAVYYCQQRNNWPPMYTFGQGTKLEIKRAEPKSCDKTHTCPPCPAPELLGGPSVFLFPPKPKDTLMISRTPEVTCVVVDVSHEDPEVKFNWYVDGVEVHNAKTKPREEQYNSTYRVVSVLTVLHQDWLNGKEYKCKVSNKALPAPIEKTISKAKGQPREPQVYTLPPSRDELTKNQVSLTCLVKGFYPSDIAVEWESNGQPENNYKTTPPVLDSDGSFFLYSKLTVDKSRWQQGNVFSCSVMHEALHNHYTQKSLSLSPGKKDPKAAAFVPVFLPAKPTTTPAPRPPTPAPTIASQPLSLRPEACRPAAGGAVHTRGLDFACDIYIWAPLAGTCGVLLLSLVITLYCNHRNRSKRSRLLHSDYMNMTPRRPGPTRKHYQPYAPPRDFAAYRSRFSVVKRGRKKLLYIFKQPFMRPVQTTQEEDGCSCRFPEEEEGGCELRVKFSRSADAPAYQQGQNQLYNELNLGRREEYDVLDKRRGRDPEMGGKPRRKNPQEGLYNELQKDKMAEAYSEIGMKGERRRGKGHDGLYQGLSTATKDTYDALHMQALPPR

SEQ ID NO: 7553 - protein, 466 aa, Artificial Sequence
  source: /note="Description of Artificial Sequence: Synthetic Chimeric Antigen Receptor"
QVQLQQSGAEVKKPGSSVKVSCKASGGTFSSYAISWVRQAPGQGLEWMGGIIPILGIANYAQKFQGRVTITADESTSTAYMELSSLRSEDTAVYYCATGGSGRYALDIWGQGTMVTVSSGGGGSGGGGSGGGGSEIVLTQSPATLSLSPGERATLSCRASQSVSSYLAWYQQKPGQAPRLLIYDASNRATGIPARFSGSGSGTDFTLTISSLEPEDFAVYYCQQRSNWPPSYTFGQGTKLEIKRAAAIEVMYPPPYLDNEKSNGTIIHVKGKHLCPSPLFPGPSKPFWVLVVVGGVLACYSLLVTVAFIIFWVRSKRSRLLHSDYMNMTPRRPGPTRKHYQPYAPPRDFAAYRSRVKFSRSADAPAYQQGQNQLYNELNLGRREEYDVLDKRRGRDPEMGGKPRRKNPQEGLYNELQKDKMAEAYSEIGMKGERRRGKGHDGLYQGLSTATKDTYDALHMQALPPR

SEQ ID NO: 7554 - protein, 470 aa, Artificial Sequence
  source: /note="Description of Artificial Sequence: Synthetic Chimeric Antigen Receptor"
QVQLQQSGAEVKKPGSSVKVSCKASGGTFSSYAISWVRQAPGQGLEWMGGIIPILGIANYAQKFQGRVTITADESTSTAYMELSSLRSEDTAVYYCATGGSGRYALDIWGQGTMVTVSSGGGGSGGGGSGGGGSEIVLTQSPATLSLSPGERATLSCRASQSVSSYLAWYQQKPGQAPRLLIYDASNRATGIPARFSGSGSGTDFTLTISSLEPEDFAVYYCQQRSNWPPSYTFGQGTKLEIKRAAATTTPAPRPPTPAPTIASQPLSLRPEACRPAAGGAVHTRGLDFACDIYIWAPLAGTCGVLLLSLVITLYCKRGRKKLLYIFKQPFMRPVQTTQEEDGCSCRFPEEEEGGCELRVKFSRSADAPAYKQGQNQLYNELNLGRREEYDVLDKRRGRDPEMGGKPRRKNPQEGLYNELQKDKMAEAYSEIGMKGERRRGKGHDGLYQGLSTATKDTYDALHMQALPPR

SEQ ID NO: 7555 - protein, 530 aa, Artificial Sequence
  source: /note="Description of Artificial Sequence: Synthetic Chimeric Antigen Receptor"
QVQLQQSGAEVKKPGSSVKVSCKASGGTFSSYAISWVRQAPGQGLEWMGGIIPILGIANYAQKFQGRVTITADESTSTAYMELSSLRSEDTAVYYCATGGSGRYALDIWGQGTMVTVSSGGGGSGGGGSGGGGSEIVLTQSPATLSLSPGERATLSCRASQSVSSYLAWYQQKPGQAPRLLIYDASNRATGIPARFSGSGSGTDFTLTISSLEPEDFAVYYCQQRSNWPPSYTFGQGTKLEIKRAAAFVPVFLPAKPTTTPAPRPPTPAPTIASQPLSLRPEACRPAAGGAVHTRGLDFACDIYIWAPLAGTCGVLLLSLVITLYCNHRNRSKRSRLLHSDYMNMTPRRPGPTRKHYQPYAPPRDFAAYRSRFSVVKRGRKKLLYIFKQPFMRPVQTTQEEDGCSCRFPEEEEGGCELRVKFSRSADAPAYQQGQNQLYNELNLGRREEYDVLDKRRGRDPEMGGKPRRKNPQEGLYNELQKDKMAEAYSEIGMKGERRRGKGHDGLYQGLSTATKDTYDALHMQALPPR

SEQ ID NO: 7556 - protein, 470 aa, Artificial Sequence
  source: /note="Description of Artificial Sequence: Synthetic Chimeric Antigen Receptor"
QVQLQQSGAEVKKPGSSVKVSCKASGGTFSSYAISWVRQAPGQGLEWMGGIIPILGIANYAQKFQGRVTITADESTSTAYMELSSLRSEDTAVYYCARGGAGGSGSYYPLIWGQGTTVTVSSGGGGSGGGGSGGGGSEIVLTQSPATLSLSPGERATLSCGASQSVSSSYLAWYQQKPGQAPRLLIYDASSRATGIPARFSGSGSGTDFTLTISSLEPEDFAVYYCQQRSSWPPTWTFGQGTKLEIKRAAAIEVMYPPPYLDNEKSNGTIIHVKGKHLCPSPLFPGPSKPFWVLVVVGGVLACYSLLVTVAFIIFWVRSKRSRLLHSDYMNMTPRRPGPTRKHYQPYAPPRDFAAYRSRVKFSRSADAPAYQQGQNQLYNELNLGRREEYDVLDKRRGRDPEMGGKPRRKNPQEGLYNELQKDKMAEAYSEIGMKGERRRGKGHDGLYQGLSTATKDTYDALHMQALPPR

SEQ ID NO: 7557 - protein, 474 aa, Artificial Sequence
  source: /note="Description of Artificial Sequence: Synthetic Chimeric Antigen Receptor"
QVQLQQSGAEVKKPGSSVKVSCKASGGTFSSYAISWVRQAPGQGLEWMGGIIPILGIANYAQKFQGRVTITADESTSTAYMELSSLRSEDTAVYYCARGGAGGSGSYYPLIWGQGTTVTVSSGGGGSGGGGSGGGGSEIVLTQSPATLSLSPGERATLSCGASQSVSSSYLAWYQQKPGQAPRLLIYDASSRATGIPARFSGSGSGTDFTLTISSLEPEDFAVYYCQQRSSWPPTWTFGQGTKLEIKRAAATTTPAPRPPTPAPTIASQPLSLRPEACRPAAGGAVHTRGLDFACDIYIWAPLAGTCGVLLLSLVITLYCKRGRKKLLYIFKQPFMRPVQTTQEEDGCSCRFPEEEEGGCELRVKFSRSADAPAYKQGQNQLYNELNLGRREEYDVLDKRRGRDPEMGGKPRRKNPQEGLYNELQKDKMAEAYSEIGMKGERRRGKGHDGLYQGLSTATKDTYDALHMQALPPR

SEQ ID NO: 7558 - protein, 534 aa, Artificial Sequence
  source: /note="Description of Artificial Sequence: Synthetic Chimeric Antigen Receptor"
QVQLQQSGAEVKKPGSSVKVSCKASGGTFSSYAISWVRQAPGQGLEWMGGIIPILGIANYAQKFQGRVTITADESTSTAYMELSSLRSEDTAVYYCARGGAGGSGSYYPLIWGQGTTVTVSSGGGGSGGGGSGGGGSEIVLTQSPATLSLSPGERATLSCGASQSVSSSYLAWYQQKPGQAPRLLIYDASSRATGIPARFSGSGSGTDFTLTISSLEPEDFAVYYCQQRSSWPPTWTFGQGTKLEIKRAAAFVPVFLPAKPTTTPAPRPPTPAPTIASQPLSLRPEACRPAAGGAVHTRGLDFACDIYIWAPLAGTCGVLLLSLVITLYCNHRNRSKRSRLLHSDYMNMTPRRPGPTRKHYQPYAPPRDFAAYRSRFSVVKRGRKKLLYIFKQPFMRPVQTTQEEDGCSCRFPEEEEGGCELRVKFSRSADAPAYQQGQNQLYNELNLGRREEYDVLDKRRGRDPEMGGKPRRKNPQEGLYNELQKDKMAEAYSEIGMKGERRRGKGHDGLYQGLSTATKDTYDALHMQALPPR

SEQ ID NO: 7559 - protein, 464 aa, Artificial Sequence
  source: /note="Description of Artificial Sequence: Synthetic Chimeric Antigen Receptor"
QVQLVQSGAEVKKPGSSVKVSCKASGGTFSSYAISWVRQAPGQGLEWMGGIIPILGTANYAQKFQGRVTITADESTSTAYMELSSLRSEDTAVYYCARWGGGAFDIWGQGTMVTVSSGGGGSGGGGSGGGGSEIVLTQSPGTLSLSPGERATLSCRASQSVGGYLAWYQQKPGQAPRLLIYDASNRATGIPARFSGSGSGTDFTLTISSLEPEDFAVYYCQQRNNWPPMYTFGQGTKLEIKRAAAIEVMYPPPYLDNEKSNGTIIHVKGKHLCPSPLFPGPSKPFWVLVVVGGVLACYSLLVTVAFIIFWVRSKRSRLLHSDYMNMTPRRPGPTRKHYQPYAPPRDFAAYRSRVKFSRSADAPAYQQGQNQLYNELNLGRREEYDVLDKRRGRDPEMGGKPRRKNPQEGLYNELQKDKMAEAYSEIGMKGERRRGKGHDGLYQGLSTATKDTYDALHMQALPPR

SEQ ID NO: 7560 - protein, 468 aa, Artificial Sequence
  source: /note="Description of Artificial Sequence: Synthetic Chimeric Antigen Receptor"
QVQLVQSGAEVKKPGSSVKVSCKASGGTFSSYAISWVRQAPGQGLEWMGGIIPILGTANYAQKFQGRVTITADESTSTAYMELSSLRSEDTAVYYCARWGGGAFDIWGQGTMVTVSSGGGGSGGGGSGGGGSEIVLTQSPGTLSLSPGERATLSCRASQSVGGYLAWYQQKPGQAPRLLIYDASNRATGIPARFSGSGSGTDFTLTISSLEPEDFAVYYCQQRNNWPPMYTFGQGTKLEIKRAAATTTPAPRPPTPAPTIASQPLSLRPEACRPAAGGAVHTRGLDFACDIYIWAPLAGTCGVLLLSLVITLYCKRGRKKLLYIFKQPFMRPVQTTQEEDGCSCRFPEEEEGGCELRVKFSRSADAPAYKQGQNQLYNELNLGRREEYDVLDKRRGRDPEMGGKPRRKNPQEGLYNELQKDKMAEAYSEIGMKGERRRGKGHDGLYQGLSTATKDTYDALHMQALPPR

SEQ ID NO: 7561 - protein, 528 aa, Artificial Sequence
  source: /note="Description of Artificial Sequence: Synthetic Chimeric Antigen Receptor"
QVQLVQSGAEVKKPGSSVKVSCKASGGTFSSYAISWVRQAPGQGLEWMGGIIPILGTANYAQKFQGRVTITADESTSTAYMELSSLRSEDTAVYYCARWGGGAFDIWGQGTMVTVSSGGGGSGGGGSGGGGSEIVLTQSPGTLSLSPGERATLSCRASQSVGGYLAWYQQKPGQAPRLLIYDASNRATGIPARFSGSGSGTDFTLTISSLEPEDFAVYYCQQRNNWPPMYTFGQGTKLEIKRAAAFVPVFLPAKPTTTPAPRPPTPAPTIASQPLSLRPEACRPAAGGAVHTRGLDFACDIYIWAPLAGTCGVLLLSLVITLYCNHRNRSKRSRLLHSDYMNMTPRRPGPTRKHYQPYAPPRDFAAYRSRFSVVKRGRKKLLYIFKQPFMRPVQTTQEEDGCSCRFPEEEEGGCELRVKFSRSADAPAYQQGQNQLYNELNLGRREEYDVLDKRRGRDPEMGGKPRRKNPQEGLYNELQKDKMAEAYSEIGMKGERRRGKGHDGLYQGLSTATKDTYDALHMQALPPR

SEQ ID NO: 7562 - protein, 906 aa, Artificial Sequence
  source: /note="Description of Artificial Sequence: Synthetic Chimeric Antigen Receptor"
QVQLQQWGAGLLKPSETLSLTCAVYGGSFSAYYWSWIRQPPGKGLEWIGDINHGGGTNYNPSLKSRVTISVDTSKNQFSLKLNSVTAADTAVYYCASLTAYWGQGSLVTVSSGSTSGSGKPGSSEGSTKGDIQMTQSPTSLSASVGDRVTITCRASQGISSWLTWYQQKPEKAPKSLIYAASSLQSGVPSRFSGSGSGTDFTLTISSLQPEDFATYYCQQYDSYPITFGQGTRLEIKGSTSGSGKPGSSEGSTKGFWVLVVVGGVLACYSLLVTVAFIIFWVKRGRKKLLYIFKQPFMRPVQTTQEEDGCSCRFPEEEEGGCELQRRKYRSNKGESPVEPAEPCHYSCPREEEGSTIPIQEDYRKPEPACSPGSTSGSGKPGSSEGSTKGRVKFSRSADAPAYKQGQNQLYNELNLGRREEYDVLDKRRGRDPEMGGKPRRKNPQEGLYNELQKDKMAEAYSEIGMKGERRRGKGHDGLYQGLSTATKDTYDALHMQALPPRGSTSGSGKPGSSEGSTKGVGALESLRGNADLAYILSMEPCGHCLIINNVNFCRESGLRTRTGSNIDCEKLRRRFSSLHFMVEVKGDLTAKKMVLALLELAQQDHGALDCCVVVILSHGCQASHLQFPGAVYGTDGCPVSVEKIVNIFNGTSCPSLGGKPKLFFIQACGGEQKDHGFEVASTSPEDESPGSNPEPDATPFQEGLRTFDQLDAISSLPTPSDIFVSYSTFPGFVSWRDPKSGSWYVETLDDIFEQWAHSEDLQSLLLRVANAVSVKGIYKQMPGCFNFLRKKLFFKTSMGVQVETISPGDGRTFPKRGQTCVVHYTGMLEDGKKVDSSRDRNKPFKFMLGKQEVIRGWEEGVAQMSVGQRAKLTISPDYAYGATGHPGIIPPHATLVFDVELLKLE

SEQ ID NO: 7563 - protein, 978 aa, Artificial Sequence
  source: /note="Description of Artificial Sequence: Synthetic Chimeric Antigen Receptor"
MDFQVQIFSFLLISASVIMSRMAQVQLQQSGAELARPGASVKMSCKASGYTFTTYTIHWVRRRPGHDLEWIGYINPSSGCSDYNQNFKGKTTLTADKSSNTAYMQLNSLTSEDSAVYYCARRADYGNYEYTWFAYWGQGTTVTVSSSGGGSGGGGSGGGGSVIELTQSPKFMSTSVGDRVNVTYKASQNVGTNVAWFQQKPGQSPKVLIYSASYRYSGVPDRFTGSGSGTDFTLTISNVQSEDLAEYFCQQYHTYPLTFGGGTKLEIKRAAAGGGGSGGGGSGGGGSGGGGSGGGGSGGGGSGGGGSGGGGSVDMAQVQLQESGGGLVQPGGSLKLSCAASGFTFSSYGMSWVRQTPDKRLELVATINSNGGSTYYPDSVKGRFTISRDNAKNTLYLQMSSLKSEDTAMYYCARDRDGYDEGFDYWGQGTTVTVSSGGGGSGGGGSGGGGSDIELTQSPSIMSASPGEKVTMTCSASSSVSYMHWYQQKSGTSPKRWIYDTSKLASGVPARFSGSGSGTSYSLTISSMEAEDAATYYCQQWSSNPPTLGRRTQLQLKRADPAEPKSPDKTHTCPPCPAPPVAGPSVFLFPPKPKDTLMIARTPEVTCVVVDVSHEDPEVKFNWYVDGVEVHNAKTKPREEQYNSTYRVVSVLTVLHQDWLNGKEYKCKVSNKALPAPIEKTISKAKGQPREPQVYTLPPSRDELTKNQVSLTCLVKGFYPSDIAVEWESNGQPENNYKTTPPVLDSDGSFFLYSKLTVDKSRWQQGNVFSCSVMHEALHNHYTQKSLSLSPGKKDPKFWVLVVVGGVLACYSLLVTVAFIIFWVRSKRSRLLHSDYMNMTPRRPGPTRKHYQAYAAARDFAAYRSLRVKFSRSADAPAYQQGQNQLYNELNLGRREEYDVLDKRRGRDPEMGGKPRRKNPQEGLYNELQKDKMAEAYSEIGMKGERRRGKGHDGLYQGLSTATKDTYDALHMQALPPR

SEQ ID NO: 7564 - protein, 527 aa, Artificial Sequence
  source: /note="Description of Artificial Sequence: Synthetic Chimeric Antigen Receptor"
GSATMAADSQTPWLLTFSLLCLLWPQEAGALPLLHESGAEVAKPGASVKMSCKASGYTFTTYWMHWIKQRPGQGLEWIGYINPSTGYTDYNQNFKDKATLTADKSSRTAYMQLSSLTSEDSTVYYCTRRGPSYGNHGAWFPYWGQGTLVTVSAVSSGGGGSGGGGSGGGGSTNIVMTQSPRSMSMSVGERVTLSCKASENVDTYVSWYQQKPEQSPKLLIYGASNRYTGVPDRFTGSGSATDFTLTISSVQAEDLADYHCGQSYRYPPTFGGGTKLEITRLSNSIMYFSHFVPVFLPAKPTTTPAPRPPTPAPTIASQPLSLRPEACRPAAGGAVHTRGLDFACDIYIWAPLAGTCGVLLLSLVITLYCRSKRGRKKLLYIFKQPFMRPVQTTQEEDGCSCRFPEEEEGGCELEFRVKFSRSADAPAYQQGQNQLYNELNLGRREEYDVLDKRRGRDPEMGGKPRRKNPQEGLYNELQKDKMAEAYSEIGMKGERRRGKGHDGLYQGLSTATKDTYDALHMQALPPR

SEQ ID NO: 7565 - protein, 252 aa, Artificial Sequence; identical to SEQ ID NO: 5931
  source: /note="Description of Artificial Sequence: Synthetic Chimeric Antigen Receptor"

SEQ ID NO: 7566 - protein, 494 aa, Artificial Sequence
  source: /note="Description of Artificial Sequence: Synthetic Chimeric Antigen Receptor"
MALPVTALLLPLALLLHAARPQVQLVQSGAEVKKPGESLKISCKGSGYSFTSYWIGWVRQMPGKGLEWMGIIYPGDSDTRYSPSFQGQVTISADKSISTAYLQWSSLKASDTAMYYCARLGGSLPDYGMDVWGQGTMVTVSSASGGGGSGGGGSGGGGSEIVLTQSPLSLPVTPGEPASISCRSSQSLLHSNGYNYLDWYLQKPGQSPQLLIYLGSNRASGVPDRFSGSGSGTDFTLKISRVEAEDVGVYYCMQALQTLITFGQGTKVDIKTTTPAPRPPTPAPTIASQPLSLRPEACRPAAGGAVHTRGLDFACDIYIWAPLAGTCGVLLLSLVITLYCKRGRKKLLYIFKQPFMRPVQTTQEEDGCSCRFPEEEEGGCELRVKFSRSADAPAYKQGQNQLYNELNLGRREEYDVLDKRRGRDPEMGGKPRRKNPQEGLYNELQKDKMAEAYSEIGMKGERRRGKGHDGLYQGLSTATKDTYDALHMQALPPR

SEQ ID NO: 7567 - protein, 436 aa, Artificial Sequence; identical to SEQ ID NO: 6900
  source: /note="Description of Artificial Sequence: Synthetic Chimeric Antigen Receptor"

SEQ ID NO: 7568 - protein, 495 aa, Artificial Sequence
  source: /note="Description of Artificial Sequence: Synthetic Chimeric Antigen Receptor"
MALPVTALLLPLALLLHAARPQVQLVQSGAEVKKPGASVRVSCKASGYIFTNYYVHWVRQAPGQGLEWMGIISPSGGSPTYAQRLQGRVTMTRDLSTSTVYMELSSLTSEDTAVYFCARESRLRGNRLGLQSSIFDHWGQGTLVTVSSASGGGGSGGGGSGGGGSDIRMTQSPPSLSASVGDRVTIPCQASQDINNHLNWYQQKPGKAPQLLIYDTSNLEIGVPSRFSGSGSGTDFTLTISSLQPEDIATYYCQQYENLPLTFGGGTKVEIKTTTPAPRPPTPAPTIASQPLSLRPEACRPAAGGAVHTRGLDFACDIYIWAPLAGTCGVLLLSLVITLYCKRGRKKLLYIFKQPFMRPVQTTQEEDGCSCRFPEEEEGGCELRVKFSRSADAPAYKQGQNQLYNELNLGRREEYDVLDKRRGRDPEMGGKPRRKNPQEGLYNELQKDKMAEAYSEIGMKGERRRGKGHDGLYQGLSTATKDTYDALHMQALPPR

SEQ ID NO: 7569 - protein, 493 aa, Artificial Sequence
  source: /note="Description of Artificial Sequence: Synthetic Chimeric Antigen Receptor"
MALPVTALLLPLALLLHAARPQVQLVQSGGGLVQPGGSLRLSCAASGFTFSSYAMSWVRQAPGKGLEWVSAISGSGGSTYYADSVKGRFTISRDNSKNTLYLQMNSLRAEDTAVYYCAKEDTIRGPNYYYYGMDVWGQGTTVTVSSASGGGGSGGGGSGGGGSETTLTQSPSSVSASVGDRVSITCRASQDIDTWLAWYQLKPGKAPKLLMYAASNLQGGVPSRFSGSGSGTDFILTISSLQPEDFATYYCQQASIFPPTFGGGTKVDIKTTTPAPRPPTPAPTIASQPLSLRPEACRPAAGGAVHTRGLDFACDIYIWAPLAGTCGVLLLSLVITLYCKRGRKKLLYIFKQPFMRPVQTTQEEDGCSCRFPEEEEGGCELRVKFSRSADAPAYKQGQNQLYNELNLGRREEYDVLDKRRGRDPEMGGKPRRKNPQEGLYNELQKDKMAEAYSEIGMKGERRRGKGHDGLYQGLSTATKDTYDALHMQALPPR

SEQ ID NO: 7570 - protein, 494 aa, Artificial Sequence
  source: /note="Description of Artificial Sequence: Synthetic Chimeric Antigen Receptor"
MALPVTALLLPLALLLHAARPQVQLVQSGAEVKKPGESLKISCKGSGYSFTSYWIGWVRQMPGKGLEWMGIIYPGDSDTRYSPSFQGQVTISADKSITTAYLQWSSLRASDSAMYYCARGGYSDYDYYFDFWGQGTLVTVSSASGGGGSGGGGSGGGGSEIVMTQSPLSLPVTPGEPASISCRSSQSLLHSNGYNYLDWYLQKPGQSPQLLIYLGSNRASGVPDRFSGSGSGTDFTLKISRVEAEDVGVYYCMQALQTPFTFGGGTKVEIKTTTPAPRPPTPAPTIASQPLSLRPEACRPAAGGAVHTRGLDFACDIYIWAPLAGTCGVLLLSLVITLYCKRGRKKLLYIFKQPFMRPVQTTQEEDGCSCRFPEEEEGGCELRVKFSRSADAPAYKQGQNQLYNELNLGRREEYDVLDKRRGRDPEMGGKPRRKNPQEGLYNELQKDKMAEAYSEIGMKGERRRGKGHDGLYQGLSTATKDTYDALHMQALPPR

SEQ ID NO: 7571 - protein, 484 aa, Artificial Sequence
  source: /note="Description of Artificial Sequence: Synthetic Chimeric Antigen Receptor"
MALPVTALLLPLALLLHAARPQVQLVQSGGDLAQPGRSLRLSCAASGFTFDDYAMHWVRQAPGKGLEWVAVIWPDGGQKYYGDSVKGRFTVSRDNPKNTLYLQMNSLRAEDTAIYYCVRHFNAWDYWGQGTLVTVSSASGGGGSGGGGSGGGGSDIQLTQSPSSLSAYVGGRVTITCQASQGISQFLNWFQQKPGKAPKLLISDASNLEPGVPSRFSGSGSGTDFTFTITNLQPEDIATYYCQQYDDLPLTFGGGTKVEIKTTTPAPRPPTPAPTIASQPLSLRPEACRPAAGGAVHTRGLDFACDIYIWAPLAGTCGVLLLSLVITLYCKRGRKKLLYIFKQPFMRPVQTTQEEDGCSCRFPEEEEGGCELRVKFSRSADAPAYKQGQNQLYNELNLGRREEYDVLDKRRGRDPEMGGKPRRKNPQEGLYNELQKDKMAEAYSEIGMKGERRRGKGHDGLYQGLSTATKDTYDALHMQALPPR

SEQ ID NO: 7572 - protein, 492 aa, Artificial Sequence
  source: /note="Description of Artificial Sequence: Synthetic Chimeric Antigen Receptor"
MALPVTALLLPLALLLHAARPQVQLVQSGGGVVQPGKSLRLSCAASGFTFSIFAMHWVRQAPGKGLEWVATISYDGSNAFYADSVEGRFTISRDNSKDSLYLQMDSLRPEDTAVYYCVKAGDGGYDVFDSWGQGTLVTVSSASGGGGSGGGGSGGGGSEIVMTQSPLSLPVTPGEPASISCRSSQSLLHSNGYNYLDWYLQKPGQSPQLLIYLGSNRASGVPDRFSGSGSGTDFTLKISRVEAEDVGVYYCMQALQTPTFGPGTKVDIKTTTPAPRPPTPAPTIASQPLSLRPEACRPAAGGAVHTRGLDFACDIYIWAPLAGTCGVLLLSLVITLYCKRGRKKLLYIFKQPFMRPVQTTQEEDGCSCRFPEEEEGGCELRVKFSRSADAPAYKQGQNQLYNELNLGRREEYDVLDKRRGRDPEMGGKPRRKNPQEGLYNELQKDKMAEAYSEIGMKGERRRGKGHDGLYQGLSTATKDTYDALHMQALPPR

SEQ ID NO: 7573 - protein, 489 aa, Artificial Sequence
  source: /note="Description of Artificial Sequence: Synthetic Chimeric Antigen Receptor"
MALPVTALLLPLALLLHAARPEVQLVESGGGLVQPGGSLRLSCAASGFTFSSYAMSWVRQAPGKGLEWVSAISGSGGSTYYADSVKGRFTISRDNSKNTLYLQMNSLRAEDTAVYYCAKETDYYGSGTFDYWGQGTLVTVSSASGGGGSGGGGSGGGGSDIQMTQSPSSLSASVGDRVTISCRASQGIGIYLAWYQQRSGKPPQLLIHGASTLQSGVPSRFSGSGSGTDFTLTISSLQPEDFASYWCQQSNNFPPTFGQGTKVEIKTTTPAPRPPTPAPTIASQPLSLRPEACRPAAGGAVHTRGLDFACDIYIWAPLAGTCGVLLLSLVITLYCKRGRKKLLYIFKQPFMRPVQTTQEEDGCSCRFPEEEEGGCELRVKFSRSADAPAYKQGQNQLYNELNLGRREEYDVLDKRRGRDPEMGGKPRRKNPQEGLYNELQKDKMAEAYSEIGMKGERRRGKGHDGLYQGLSTATKDTYDALHMQALPPR

SEQ ID NO: 7574 - protein, 489 aa, Artificial Sequence
  source: /note="Description of Artificial Sequence: Synthetic Chimeric Antigen Receptor"
MALPVTALLLPLALLLHAARPQVQLVQSGAEVKKPGASVRVSCKASGYMFTDFFIHWVRQAPGQGLEWMGWINPNSGVTKYAQKFQGRVTMTRNTSISTAYMELSSLRSEDTAVYYCATWYSSGWYGIANIWGQGTMVTVSSASGGGGSGGGGSGGGGSDIQLTQSPSSLSASVGDRVTITCQASHDISNYLHWYQQKPGKAPKLLIYDASNLETGVPSRFTGSGSGTDFTLTIRSLQPEDVAAYYCQQSDDLPHTFGQGTKVDIKTTTPAPRPPTPAPTIASQPLSLRPEACRPAAGGAVHTRGLDFACDIYIWAPLAGTCGVLLLSLVITLYCKRGRKKLLYIFKQPFMRPVQTTQEEDGCSCRFPEEEEGGCELRVKFSRSADAPAYKQGQNQLYNELNLGRREEYDVLDKRRGRDPEMGGKPRRKNPQEGLYNELQKDKMAEAYSEIGMKGERRRGKGHDGLYQGLSTATKDTYDALHMQALPPR

SEQ ID NO: 7575 - protein, 488 aa, Artificial Sequence
  source: /note="Description of Artificial Sequence: Synthetic Chimeric Antigen Receptor"
MALPVTALLLPLALLLHAARPQVQLVQSGAEVKKPGESLKISCKGSGYSFTNYWIGWVRQMPGKGLEWMGIIYPGDSDTRYSPSFQGQVTISADKSISTAYLQWSSLKASDTAMYYCARHGPSSWGEFDYWGQGTLVTVSSASGGGGSGGGGSGGGGSDIRLTQSPSSLSASVGDRVTITCRASQSISSYLNWYQQKPGKAPKLLIYAASSLQSGVPSRFSGSGSGTDFTLTISSLQPEDFATYYCQQSYSTPLTFGGGTKVDIKTTTPAPRPPTPAPTIASQPLSLRPEACRPAAGGAVHTRGLDFACDIYIWAPLAGTCGVLLLSLVITLYCKRGRKKLLYIFKQPFMRPVQTTQEEDGCSCRFPEEEEGGCELRVKFSRSADAPAYKQGQNQLYNELNLGRREEYDVLDKRRGRDPEMGGKPRRKNPQEGLYNELQKDKMAEAYSEIGMKGERRRGKGHDGLYQGLSTATKDTYDALHMQALPPR

SEQ ID NO: 7576 - protein, 462 aa, Artificial Sequence
  source: /note="Description of Artificial Sequence: Synthetic Chimeric Antigen Receptor"
MALPVTALLLPLALLLHAARPQAYLQQSGAELVRSGASVKMSCKASGYTFTSYNLHWVKQTPGQGLEWIGYIYPGNGGTNYNQKFKGKATLTADTSSSTAYMQISSLTSEDSAVYFCARGGIYYYGSSLDYWGQGTTLTVSSGGGGSGGGGSGGGGSNIVLTQSPASLAVSLGQRATISCRASESVDNYGTTFMYWYQQKPGQPPKLLIYLASNLESGVPARFSGSGSGTDFTLTIDPVEADDAATYYCQQNKEDPWTFGGGTKLEIKGLAVSTISSFFPPGYQIYIWAPLAGTCGVLLLSLVITLYCKRGRKKLLYIFKQPFMRPVQTTQEEDGCSCRFPEEEEGGCELRVKFSRSADAPAYQQGQNQLYNELNLGRREEYDVLDKRRGRDPEMGGKPRRKNPQEGLYNELQKDKMAEAYSEIGMKGERRRGKGHDGLYQGLSTATKDTYDALHMQALPPR

SEQ ID NO: 7577 - protein, 439 aa, Artificial Sequence; identical to SEQ ID NO: 6901
  source: /note="Description of Artificial Sequence: Synthetic Chimeric Antigen Receptor"

SEQ ID NO: 7578 - protein, 465 aa, Artificial Sequence; identical to SEQ ID NO: 6902
  source: /note="Description of Artificial Sequence: Synthetic Chimeric Antigen Receptor"

SEQ ID NO: 7579 - protein, 468 aa, Artificial Sequence; identical to SEQ ID NO: 6903
  source: /note="Description of Artificial Sequence: Synthetic Chimeric Antigen Receptor"

SEQ ID NO: 7580 - protein, 651 aa, Artificial Sequence; identical to SEQ ID NO: 6904
  source: /note="Description of Artificial Sequence: Synthetic Chimeric Antigen Receptor"

SEQ ID NO: 7581 - protein, 654 aa, Artificial Sequence; identical to SEQ ID NO: 6905
  source: /note="Description of Artificial Sequence: Synthetic Chimeric Antigen Receptor"

SEQ ID NO: 7582 - protein, 434 aa, Artificial Sequence; identical to SEQ ID NO: 6906
  source: /note="Description of Artificial Sequence: Synthetic Chimeric Antigen Receptor"

SEQ ID NO: 7583 - protein, 437 aa, Artificial Sequence; identical to SEQ ID NO: 6907
  source: /note="Description of Artificial Sequence: Synthetic Chimeric Antigen Receptor"

SEQ ID NO: 7584 - protein, 463 aa, Artificial Sequence; identical to SEQ ID NO: 6908
  source: /note="Description of Artificial Sequence: Synthetic Chimeric Antigen Receptor"

SEQ ID NO: 7585 - protein, 466 aa, Artificial Sequence; identical to SEQ ID NO: 6909
  source: /note="Description of Artificial Sequence: Synthetic Chimeric Antigen Receptor"

SEQ ID NO: 7586 - protein, 649 aa, Artificial Sequence; identical to SEQ ID NO: 6910
  source: /note="Description of Artificial Sequence: Synthetic Chimeric Antigen Receptor"

SEQ ID NO: 7587 - protein, 652 aa, Artificial Sequence
  source: /note="Description of Artificial Sequence: Synthetic Chimeric Antigen Receptor"
QVQLQQSGPELVRPGTFVKISCKASGYTFTNYDINWVNQRPGQGLEWIGWIYPGDGSTKYNEKFKAKATLTADKSSSTAYLQLNNLTSENSAVYFCASGYEDAMDYWGQGTSVTVSSGGGGSGGGGSGGGGSDIKMTQSPSSMYASLGERVIINCKASQDINSYLSWFQQKPGKSPKTLIYRANRLVDGVPSRFSGSGSGQDYSLTISSLEYEDMGIYYCLQYDEFPLTFGAGTKLELKREPKSPDKTHTCPPCPAPPVAGPSVFLFPPKPKDTLMIARTPEVTCVVVDVSHEDPEVKFNWYVDGVEVHNAKTKPREEQYNSTYRVVSVLTVLHQDWLNGKEYKCKVSNKALPAPIEKTISKAKGQPREPQVYTLPPSRDELTKNQVSLTCLVKGFYPSDIAVEWESNGQPENNYKTTPPVLDSDGSFFLYSKLTVDKSRWQQGNVFSCSVMHEALHNHYTQKSLSLSPGKIISFFLALTSTALLFLLFFLTLRFSVVKRGRKKLLYIFKQPFMRPVQTTQEEDGCSCRFPEEEEGGCELRVKFSRSADAPAYQQGQNQLYNELNLGRREEYDVLDKRRGRDPEMGGKPRRKNPQEGLYNELQKDKMAEAYSEIGMKGERRRGKGHDGLYQGLSTATKDTYDALHMQALPPR

SEQ ID NO: 7588 - protein, 444 aa, Artificial Sequence; identical to SEQ ID NO: 6912
  source: /note="Description of Artificial Sequence: Synthetic Chimeric Antigen Receptor"

SEQ ID NO: 7589 - protein, 447 aa, Artificial Sequence; identical to SEQ ID NO: 6913
  source: /note="Description of Artificial Sequence: Synthetic Chimeric Antigen Receptor"

SEQ ID NO: 7590 - protein, 473 aa, Artificial Sequence; identical to SEQ ID NO: 6914
  source: /note="Description of Artificial Sequence: Synthetic Chimeric Antigen Receptor"

SEQ ID NO: 7591 - protein, 476 aa, Artificial Sequence; identical to SEQ ID NO: 6915
  source: /note="Description of Artificial Sequence: Synthetic Chimeric Antigen Receptor"

SEQ ID NO: 7592 - protein, 659 aa, Artificial Sequence; identical to SEQ ID NO: 6916
  source: /note="Description of Artificial Sequence: Synthetic Chimeric Antigen Receptor"

SEQ ID NO: 7593 - protein, 662 aa, Artificial Sequence; identical to SEQ ID NO: 6917
  source: /note="Description of Artificial Sequence: Synthetic Chimeric Antigen Receptor"

SEQ ID NO: 7594 - protein, 440 aa, Artificial Sequence; identical to SEQ ID NO: 6918
  source: /note="Description of Artificial Sequence: Synthetic Chimeric Antigen Receptor"

SEQ ID NO: 7595 - protein, 443 aa, Artificial Sequence; identical to SEQ ID NO: 6919
  source: /note="Description of Artificial Sequence: Synthetic Chimeric Antigen Receptor"

SEQ ID NO: 7596 - protein, 469 aa, Artificial Sequence; identical to SEQ ID NO: 6920
  source: /note="Description of Artificial Sequence: Synthetic Chimeric Antigen Receptor"

SEQ ID NO: 7597 - protein, 472 aa, Artificial Sequence; identical to SEQ ID NO: 6921
  source: /note="Description of Artificial Sequence: Synthetic Chimeric Antigen Receptor"

SEQ ID NO: 7598 - protein, 655 aa, Artificial Sequence; identical to SEQ ID NO: 6922
  source: /note="Description of Artificial Sequence: Synthetic Chimeric Antigen Receptor"

SEQ ID NO: 7599 - protein, 658 aa, Artificial Sequence; identical to SEQ ID NO: 6923
  source: /note="Description of Artificial Sequence: Synthetic Chimeric Antigen Receptor"

SEQ ID NO: 7600 - protein, 457 aa, Artificial Sequence
  source: /note="Description of Artificial Sequence: Synthetic Chimeric Antigen Receptor"
MALPVTALLLPLALLLHAARPEVQLQQSGPELVKPGASVKISCKASGYTFTDYNMHWVKQSHGKSLEWIGYIYPYNGGTGYNQKFKSKATLTVDNSSSTAYMDVRSLTSEDSAVYYCARGRPAMDYWGQGTSVTVSSGGGGSGGGGSGGGGSDIVLTQSPASLAVSLGQRATISCRASESVDNYGISFMNWFQQKPGQPPKLLIYAASNQGSGVPARFSGSGSGTDFSLNIHPMEEDDTAMYFCQQSKEVPWTFGGGTKLEIKGLAVSTISSFFPPGYQIYIWAPLAGTCGVLLLSLVITLYCKRGRKKLLYIFKQPFMRPVQTTQEEDGCSCRFPEEEEGGCELRVKFSRSADAPAYQQGQNQLYNELNLGRREEYDVLDKRRGRDPEMGGKPRRKNPQEGLYNELQKDKMAEAYSEIGMKGERRRGKGHDGLYQGLSTATKDTYDALHMQALPPR

SEQ ID NO: 7601 - protein, 460 aa, Artificial Sequence
  source: /note="Description of Artificial Sequence: Synthetic Chimeric Antigen Receptor"
MALPVTALLLPLALLLHAARPEVQLQQSGPELVKPGASVKISCKASGYTFTDYNMHWVKQSHGKSLEWIGYIYPYNGGTGYNQKFKSKATLTVDNSSSTAYMDVRSLTSEDSAVYYCARGRPAMDYWGQGTSVTVSSGGGGSGGGGSGGGGSDIVLTQSPASLAVSLGQRATISCRASESVDNYGISFMNWFQQKPGQPPKLLIYAASNQGSGVPARFSGSGSGTDFSLNIHPMEEDDTAMYFCQQSKEVPWTFGGGTKLEIKGLAVSTISSFFPPGYQIISFFLALTSTALLFLLFFLTLRFSVVKRGRKKLLYIFKQPFMRPVQTTQEEDGCSCRFPEEEEGGCELRVKFSRSADAPAYQQGQNQLYNELNLGRREEYDVLDKRRGRDPEMGGKPRRKNPQEGLYNELQKDKMAEAYSEIGMKGERRRGKGHDGLYQGLSTATKDTYDALHMQALPPR

SEQ ID NO: 7602 - protein, 486 aa, Artificial Sequence
  source: /note="Description of Artificial Sequence: Synthetic Chimeric Antigen Receptor"
MALPVTALLLPLALLLHAARPEVQLQQSGPELVKPGASVKISCKASGYTFTDYNMHWVKQSHGKSLEWIGYIYPYNGGTGYNQKFKSKATLTVDNSSSTAYMDVRSLTSEDSAVYYCARGRPAMDYWGQGTSVTVSSGGGGSGGGGSGGGGSDIVLTQSPASLAVSLGQRATISCRASESVDNYGISFMNWFQQKPGQPPKLLIYAASNQGSGVPARFSGSGSGTDFSLNIHPMEEDDTAMYFCQQSKEVPWTFGGGTKLEIKTTTPAPRPPTPAPTIASQPLSLRPEACRPAAGGAVHTRGLDFACDIYIWAPLAGTCGVLLLSLVITLYCKRGRKKLLYIFKQPFMRPVQTTQEEDGCSCRFPEEEEGGCELRVKFSRSADAPAYQQGQNQLYNELNLGRREEYDVLDKRRGRDPEMGGKPRRKNPQEGLYNELQKDKMAEAYSEIGMKGERRRGKGHDGLYQGLSTATKDTYDALHMQALPPR

SEQ ID NO: 7603 - protein, 489 aa, Artificial Sequence
  source: /note="Description of Artificial Sequence: Synthetic Chimeric Antigen Receptor"
MALPVTALLLPLALLLHAARPEVQLQQSGPELVKPGASVKISCKASGYTFTDYNMHWVKQSHGKSLEWIGYIYPYNGGTGYNQKFKSKATLTVDNSSSTAYMDVRSLTSEDSAVYYCARGRPAMDYWGQGTSVTVSSGGGGSGGGGSGGGGSDIVLTQSPASLAVSLGQRATISCRASESVDNYGISFMNWFQQKPGQPPKLLIYAASNQGSGVPARFSGSGSGTDFSLNIHPMEEDDTAMYFCQQSKEVPWTFGGGTKLEIKTTTPAPRPPTPAPTIASQPLSLRPEACRPAAGGAVHTRGLDFACDIISFFLALTSTALLFLLFFLTLRFSVVKRGRKKLLYIFKQPFMRPVQTTQEEDGCSCRFPEEEEGGCELRVKFSRSADAPAYQQGQNQLYNELNLGRREEYDVLDKRRGRDPEMGGKPRRKNPQEGLYNELQKDKMAEAYSEIGMKGERRRGKGHDGLYQGLSTATKDTYDALHMQALPPR

SEQ ID NO: 7604 - protein, 672 aa, Artificial Sequence
  source: /note="Description of Artificial Sequence: Synthetic Chimeric Antigen Receptor"
MALPVTALLLPLALLLHAARPEVQLQQSGPELVKPGASVKISCKASGYTFTDYNMHWVKQSHGKSLEWIGYIYPYNGGTGYNQKFKSKATLTVDNSSSTAYMDVRSLTSEDSAVYYCARGRPAMDYWGQGTSVTVSSGGGGSGGGGSGGGGSDIVLTQSPASLAVSLGQRATISCRASESVDNYGISFMNWFQQKPGQPPKLLIYAASNQGSGVPARFSGSGSGTDFSLNIHPMEEDDTAMYFCQQSKEVPWTFGGGTKLEIKEPKSPDKTHTCPPCPAPPVAGPSVFLFPPKPKDTLMIARTPEVTCVVVDVSHEDPEVKFNWYVDGVEVHNAKTKPREEQYNSTYRVVSVLTVLHQDWLNGKEYKCKVSNKALPAPIEKTISKAKGQPREPQVYTLPPSRDELTKNQVSLTCLVKGFYPSDIAVEWESNGQPENNYKTTPPVLDSDGSFFLYSKLTVDKSRWQQGNVFSCSVMHEALHNHYTQKSLSLSPGKIYIWAPLAGTCGVLLLSLVITLYCKRGRKKLLYIFKQPFMRPVQTTQEEDGCSCRFPEEEEGGCELRVKFSRSADAPAYQQGQNQLYNELNLGRREEYDVLDKRRGRDPEMGGKPRRKNPQEGLYNELQKDKMAEAYSEIGMKGERRRGKGHDGLYQGLSTATKDTYDALHMQALPPR

SEQ ID NO: 7605 - protein, 675 aa, Artificial Sequence
  source: /note="Description of Artificial Sequence: Synthetic Chimeric Antigen Receptor"
MALPVTALLLPLALLLHAARPEVQLQQSGPELVKPGASVKISCKASGYTFTDYNMHWVKQSHGKSLEWIGYIYPYNGGTGYNQKFKSKATLTVDNSSSTAYMDVRSLTSEDSAVYYCARGRPAMDYWGQGTSVTVSSGGGGSGGGGSGGGGSDIVLTQSPASLAVSLGQRATISCRASESVDNYGISFMNWFQQKPGQPPKLLIYAASNQGSGVPARFSGSGSGTDFSLNIHPMEEDDTAMYFCQQSKEVPWTFGGGTKLEIKEPKSPDKTHTCPPCPAPPVAGPSVFLFPPKPKDTLMIARTPEVTCVVVDVSHEDPEVKFNWYVDGVEVHNAKTKPREEQYNSTYRVVSVLTVLHQDWLNGKEYKCKVSNKALPAPIEKTISKAKGQPREPQVYTLPPSRDELTKNQVSLTCLVKGFYPSDIAVEWESNGQPENNYKTTPPVLDSDGSFFLYSKLTVDKSRWQQGNVFSCSVMHEALHNHYTQKSLSLSPGKIISFFLALTSTALLFLLFFLTLRFSVVKRGRKKLLYIFKQPFMRPVQTTQEEDGCSCRFPEEEEGGCELRVKFSRSADAPAYQQGQNQLYNELNLGRREEYDVLDKRRGRDPEMGGKPRRKNPQEGLYNELQKDKMAEAYSEIGMKGERRRGKGHDGLYQGLSTATKDTYDALHMQALPPR

SEQ ID NO: 7606 - protein, 455 aa, Artificial Sequence
  source: /note="Description of Artificial Sequence: Synthetic Chimeric Antigen Receptor"
MALPVTALLLPLALLLHAARPQVQLQQSGPELVRPGTFVKISCKASGYTFTNYDINWVNQRPGQGLEWIGWIYPGDGSTKYNEKFKAKATLTADKSSSTAYLQLNNLTSENSAVYFCASGYEDAMDYWGQGTSVTVSSGGGGSGGGGSGGGGSDIKMTQSPSSMYASLGERVIINCKASQDINSYLSWFQQKPGKSPKTLIYRANRLVDGVPSRFSGSGSGQDYSLTISSLEYEDMGIYYCLQYDEFPLTFGAGTKLELKRGLAVSTISSFFPPGYQIYIWAPLAGTCGVLLLSLVITLYCKRGRKKLLYIFKQPFMRPVQTTQEEDGCSCRFPEEEEGGCELRVKFSRSADAPAYQQGQNQLYNELNLGRREEYDVLDKRRGRDPEMGGKPRRKNPQEGLYNELQKDKMAEAYSEIGMKGERRRGKGHDGLYQGLSTATKDTYDALHMQALPPR

SEQ ID NO: 7607 - protein, 458 aa, Artificial Sequence
  source: /note="Description of Artificial Sequence: Synthetic Chimeric Antigen Receptor"
MALPVTALLLPLALLLHAARPQVQLQQSGPELVRPGTFVKISCKASGYTFTNYDINWVNQRPGQGLEWIGWIYPGDGSTKYNEKFKAKATLTADKSSSTAYLQLNNLTSENSAVYFCASGYEDAMDYWGQGTSVTVSSGGGGSGGGGSGGGGSDIKMTQSPSSMYASLGERVIINCKASQDINSYLSWFQQKPGKSPKTLIYRANRLVDGVPSRFSGSGSGQDYSLTISSLEYEDMGIYYCLQYDEFPLTFGAGTKLELKRGLAVSTISSFFPPGYQIISFFLALTSTALLFLLFFLTLRFSVVKRGRKKLLYIFKQPFMRPVQTTQEEDGCSCRFPEEEEGGCELRVKFSRSADAPAYQQGQNQLYNELNLGRREEYDVLDKRRGRDPEMGGKPRRKNPQEGLYNELQKDKMAEAYSEIGMKGERRRGKGHDGLYQGLSTATKDTYDALHMQALPPR

SEQ ID NO: 7608 - protein, 484 aa, Artificial Sequence
  source: /note="Description of Artificial Sequence: Synthetic Chimeric Antigen Receptor"
MALPVTALLLPLALLLHAARPQVQLQQSGPELVRPGTFVKISCKASGYTFTNYDINWVNQRPGQGLEWIGWIYPGDGSTKYNEKFKAKATLTADKSSSTAYLQLNNLTSENSAVYFCASGYEDAMDYWGQGTSVTVSSGGGGSGGGGSGGGGSDIKMTQSPSSMYASLGERVIINCKASQDINSYLSWFQQKPGKSPKTLIYRANRLVDGVPSRFSGSGSGQDYSLTISSLEYEDMGIYYCLQYDEFPLTFGAGTKLELKRTTTPAPRPPTPAPTIASQPLSLRPEACRPAAGGAVHTRGLDFACDIYIWAPLAGTCGVLLLSLVITLYCKRGRKKLLYIFKQPFMRPVQTTQEEDGCSCRFPEEEEGGCELRVKFSRSADAPAYQQGQNQLYNELNLGRREEYDVLDKRRGRDPEMGGKPRRKNPQEGLYNELQKDKMAEAYSEIGMKGERRRGKGHDGLYQGLSTATKDTYDALHMQALPPR

SEQ ID NO: 7609 - protein, 487 aa, Artificial Sequence
  source: /note="Description of Artificial Sequence: Synthetic Chimeric Antigen Receptor"
MALPVTALLLPLALLLHAARPQVQLQQSGPELVRPGTFVKISCKASGYTFTNYDINWVNQRPGQGLEWIGWIYPGDGSTKYNEKFKAKATLTADKSSSTAYLQLNNLTSENSAVYFCASGYEDAMDYWGQGTSVTVSSGGGGSGGGGSGGGGSDIKMTQSPSSMYASLGERVIINCKASQDINSYLSWFQQKPGKSPKTLIYRANRLVDGVPSRFSGSGSGQDYSLTISSLEYEDMGIYYCLQYDEFPLTFGAGTKLELKRTTTPAPRPPTPAPTIASQPLSLRPEACRPAAGGAVHTRGLDFACDIISFFLALTSTALLFLLFFLTLRFSVVKRGRKKLLYIFKQPFMRPVQTTQEEDGCSCRFPEEEEGGCELRVKFSRSADAPAYQQGQNQLYNELNLGRREEYDVLDKRRGRDPEMGGKPRRKNPQEGLYNELQKDKMAEAYSEIGMKGERRRGKGHDGLYQGLSTATKDTYDALHMQALPPR

SEQ ID NO: 7610 - protein, 670 aa, Artificial Sequence
  source: /note="Description of Artificial Sequence: Synthetic Chimeric Antigen Receptor"
MALPVTALLLPLALLLHAARPQVQLQQSGPELVRPGTFVKISCKASGYTFTNYDINWVNQRPGQGLEWIGWIYPGDGSTKYNEKFKAKATLTADKSSSTAYLQLNNLTSENSAVYFCASGYEDAMDYWGQGTSVTVSSGGGGSGGGGSGGGGSDIKMTQSPSSMYASLGERVIINCKASQDINSYLSWFQQKPGKSPKTLIYRANRLVDGVPSRFSGSGSGQDYSLTISSLEYEDMGIYYCLQYDEFPLTFGAGTKLELKREPKSPDKTHTCPPCPAPPVAGPSVFLFPPKPKDTLMIARTPEVTCVVVDVSHEDPEVKFNWYVDGVEVHNAKTKPREEQYNSTYRVVSVLTVLHQDWLNGKEYKCKVSNKALPAPIEKTISKAKGQPREPQVYTLPPSRDELTKNQVSLTCLVKGFYPSDIAVEWESNGQPENNYKTTPPVLDSDGSFFLYSKLTVDKSRWQQGNVFSCSVMHEALHNHYTQKSLSLSPGKIYIWAPLAGTCGVLLLSLVITLYCKRGRKKLLYIFKQPFMRPVQTTQEEDGCSCRFPEEEEGGCELRVKFSRSADAPAYQQGQNQLYNELNLGRREEYDVLDKRRGRDPEMGGKPRRKNPQEGLYNELQKDKMAEAYSEIGMKGERRRGKGHDGLYQGLSTATKDTYDALHMQALPPR

SEQ ID NO: 7611 - protein, 673 aa, Artificial Sequence
  source: /note="Description of Artificial Sequence: Synthetic Chimeric Antigen Receptor"
MALPVTALLLPLALLLHAARPQVQLQQSGPELVRPGTFVKISCKASGYTFTNYDINWVNQRPGQGLEWIGWIYPGDGSTKYNEKFKAKATLTADKSSSTAYLQLNNLTSENSAVYFCASGYEDAMDYWGQGTSVTVSSGGGGSGGGGSGGGGSDIKMTQSPSSMYASLGERVIINCKASQDINSYLSWFQQKPGKSPKTLIYRANRLVDGVPSRFSGSGSGQDYSLTISSLEYEDMGIYYCLQYDEFPLTFGAGTKLELKREPKSPDKTHTCPPCPAPPVAGPSVFLFPPKPKDTLMIARTPEVTCVVVDVSHEDPEVKFNWYVDGVEVHNAKTKPREEQYNSTYRVVSVLTVLHQDWLNGKEYKCKVSNKALPAPIEKTISKAKGQPREPQVYTLPPSRDELTKNQVSLTCLVKGFYPSDIAVEWESNGQPENNYKTTPPVLDSDGSFFLYSKLTVDKSRWQQGNVFSCSVMHEALHNHYTQKSLSLSPGKIISFFLALTSTALLFLLFFLTLRFSVVKRGRKKLLYIFKQPFMRPVQTTQEEDGCSCRFPEEEEGGCELRVKFSRSADAPAYQQGQNQLYNELNLGRREEYDVLDKRRGRDPEMGGKPRRKNPQEGLYNELQKDKMAEAYSEIGMKGERRRGKGHDGLYQGLSTATKDTYDALHMQALPPR

SEQ ID NO: 7612 - protein, 465 aa, Artificial Sequence
  source: /note="Description of Artificial Sequence: Synthetic Chimeric Antigen Receptor"
MALPVTALLLPLALLLHAARPEVKLQESGPELVKPGASVKMSCKASGYKFTDYVVHWLKQKPGQGLEWIGYINPYNDGTKYNEKFKGKATLTSDKSSSTAYMEVSSLTSEDSAVYYCARDYRYEVYGMDYWGQGTSVTVSSGGGGSGGGGSGGGGSDIVLTQSPTIMSASPGERVTMTCTASSSVNYIHWYQQKSGDSPLRWIFDTSKVASGVPARFSGSGSGTSYSLTISTMEAEDAATYYCQQWRSYPLTFGDGTRLELKRADAAPTVSGLAVSTISSFFPPGYQIYIWAPLAGTCGVLLLSLVITLYCKRGRKKLLYIFKQPFMRPVQTTQEEDGCSCRFPEEEEGGCELRVKFSRSADAPAYQQGQNQLYNELNLGRREEYDVLDKRRGRDPEMGGKPRRKNPQEGLYNELQKDKMAEAYSEIGMKGERRRGKGHDGLYQGLSTATKDTYDALHMQALPPR

SEQ ID NO: 7613 - protein, 468 aa, Artificial Sequence
  source: /note="Description of Artificial Sequence: Synthetic Chimeric Antigen Receptor"
MALPVTALLLPLALLLHAARPEVKLQESGPELVKPGASVKMSCKASGYKFTDYVVHWLKQKPGQGLEWIGYINPYNDGTKYNEKFKGKATLTSDKSSSTAYMEVSSLTSEDSAVYYCARDYRYEVYGMDYWGQGTSVTVSSGGGGSGGGGSGGGGSDIVLTQSPTIMSASPGERVTMTCTASSSVNYIHWYQQKSGDSPLRWIFDTSKVASGVPARFSGSGSGTSYSLTISTMEAEDAATYYCQQWRSYPLTFGDGTRLELKRADAAPTVSGLAVSTISSFFPPGYQIISFFLALTSTALLFLLFFLTLRFSVVKRGRKKLLYIFKQPFMRPVQTTQEEDGCSCRFPEEEEGGCELRVKFSRSADAPAYQQGQNQLYNELNLGRREEYDVLDKRRGRDPEMGGKPRRKNPQEGLYNELQKDKMAEAYSEIGMKGERRRGKGHDGLYQGLSTATKDTYDALHMQALPPR

SEQ ID NO: 7614 - protein, 494 aa, Artificial Sequence
  source: /note="Description of Artificial Sequence: Synthetic Chimeric Antigen Receptor"
MALPVTALLLPLALLLHAARPEVKLQESGPELVKPGASVKMSCKASGYKFTDYVVHWLKQKPGQGLEWIGYINPYNDGTKYNEKFKGKATLTSDKSSSTAYMEVSSLTSEDSAVYYCARDYRYEVYGMDYWGQGTSVTVSSGGGGSGGGGSGGGGSDIVLTQSPTIMSASPGERVTMTCTASSSVNYIHWYQQKSGDSPLRWIFDTSKVASGVPARFSGSGSGTSYSLTISTMEAEDAATYYCQQWRSYPLTFGDGTRLELKRADAAPTVSTTTPAPRPPTPAPTIASQPLSLRPEACRPAAGGAVHTRGLDFACDIYIWAPLAGTCGVLLLSLVITLYCKRGRKKLLYIFKQPFMRPVQTTQEEDGCSCRFPEEEEGGCELRVKFSRSADAPAYQQGQNQLYNELNLGRREEYDVLDKRRGRDPEMGGKPRRKNPQEGLYNELQKDKMAEAYSEIGMKGERRRGKGHDGLYQGLSTATKDTYDALHMQALPPR

SEQ ID NO: 7615 - protein, 497 aa, Artificial Sequence
  source: /note="Description of Artificial Sequence: Synthetic Chimeric Antigen Receptor"
MALPVTALLLPLALLLHAARPEVKLQESGPELVKPGASVKMSCKASGYKFTDYVVHWLKQKPGQGLEWIGYINPYNDGTKYNEKFKGKATLTSDKSSSTAYMEVSSLTSEDSAVYYCARDYRYEVYGMDYWGQGTSVTVSSGGGGSGGGGSGGGGSDIVLTQSPTIMSASPGERVTMTCTASSSVNYIHWYQQKSGDSPLRWIFDTSKVASGVPARFSGSGSGTSYSLTISTMEAEDAATYYCQQWRSYPLTFGDGTRLELKRADAAPTVSTTTPAPRPPTPAPTIASQPLSLRPEACRPAAGGAVHTRGLDFACDIISFFLALTSTALLFLLFFLTLRFSVVKRGRKKLLYIFKQPFMRPVQTTQEEDGCSCRFPEEEEGGCELRVKFSRSADAPAYQQGQNQLYNELNLGRREEYDVLDKRRGRDPEMGGKPRRKNPQEGLYNELQKDKMAEAYSEIGMKGERRRGKGHDGLYQGLSTATKDTYDALHMQALPPR

SEQ ID NO: 7616 - protein, 680 aa, Artificial Sequence
  source: /note="Description of Artificial Sequence: Synthetic Chimeric Antigen Receptor"
MALPVTALLLPLALLLHAARPEVKLQESGPELVKPGASVKMSCKASGYKFTDYVVHWLKQKPGQGLEWIGYINPYNDGTKYNEKFKGKATLTSDKSSSTAYMEVSSLTSEDSAVYYCARDYRYEVYGMDYWGQGTSVTVSSGGGGSGGGGSGGGGSDIVLTQSPTIMSASPGERVTMTCTASSSVNYIHWYQQKSGDSPLRWIFDTSKVASGVPARFSGSGSGTSYSLTISTMEAEDAATYYCQQWRSYPLTFGDGTRLELKRADAAPTVSEPKSPDKTHTCPPCPAPPVAGPSVFLFPPKPKDTLMIARTPEVTCVVVDVSHEDPEVKFNWYVDGVEVHNAKTKPREEQYNSTYRVVSVLTVLHQDWLNGKEYKCKVSNKALPAPIEKTISKAKGQPREPQVYTLPPSRDELTKNQVSLTCLVKGFYPSDIAVEWESNGQPENNYKTTPPVLDSDGSFFLYSKLTVDKSRWQQGNVFSCSVMHEALHNHYTQKSLSLSPGKIYIWAPLAGTCGVLLLSLVITLYCKRGRKKLLYIFKQPFMRPVQTTQEEDGCSCRFPEEEEGGCELRVKFSRSADAPAYQQGQNQLYNELNLGRREEYDVLDKRRGRDPEMGGKPRRKNPQEGLYNELQKDKMAEAYSEIGMKGERRRGKGHDGLYQGLSTATKDTYDALHMQALPPR

SEQ ID NO: 7617 - protein, 683 aa, Artificial Sequence
  source: /note="Description of Artificial Sequence: Synthetic Chimeric Antigen Receptor"
MALPVTALLLPLALLLHAARPEVKLQESGPELVKPGASVKMSCKASGYKFTDYVVHWLKQKPGQGLEWIGYINPYNDGTKYNEKFKGKATLTSDKSSSTAYMEVSSLTSEDSAVYYCARDYRYEVYGMDYWGQGTSVTVSSGGGGSGGGGSGGGGSDIVLTQSPTIMSASPGERVTMTCTASSSVNYIHWYQQKSGDSPLRWIFDTSKVASGVPARFSGSGSGTSYSLTISTMEAEDAATYYCQQWRSYPLTFGDGTRLELKRADAAPTVSEPKSPDKTHTCPPCPAPPVAGPSVFLFPPKPKDTLMIARTPEVTCVVVDVSHEDPEVKFNWYVDGVEVHNAKTKPREEQYNSTYRVVSVLTVLHQDWLNGKEYKCKVSNKALPAPIEKTISKAKGQPREPQVYTLPPSRDELTKNQVSLTCLVKGFYPSDIAVEWESNGQPENNYKTTPPVLDSDGSFFLYSKLTVDKSRWQQGNVFSCSVMHEALHNHYTQKSLSLSPGKIISFFLALTSTALLFLLFFLTLRFSVVKRGRKKLLYIFKQPFMRPVQTTQEEDGCSCRFPEEEEGGCELRVKFSRSADAPAYQQGQNQLYNELNLGRREEYDVLDKRRGRDPEMGGKPRRKNPQEGLYNELQKDKMAEAYSEIGMKGERRRGKGHDGLYQGLSTATKDTYDALHMQALPPR

SEQ ID NO: 7618 - protein, 461 aa, Artificial Sequence
  source: /note="Description of Artificial Sequence: Synthetic Chimeric Antigen Receptor"
MALPVTALLLPLALLLHAARPQVQLQQPGAEVVKPGASVKMSCKASGYTFTSYYIHWIKQTPGQGLEWVGVIYPGNDDISYNQKFKGKATLTADKSSTTAYMQLSSLTSEDSAVYYCAREVRLRYFDVWGAGTTVTVSSGGGGSGGGGSGGGGSNIMLTQSPSSLAVSAGEKVTMSCKSSQSVFFSSSQKNYLAWYQQIPGQSPKLLIYWASTRESGVPDRFTGSGSGTDFTLTISSVQSEDLAIYYCHQYLSSRTFGGGTKLEIKRGLAVSTISSFFPPGYQIYIWAPLAGTCGVLLLSLVITLYCKRGRKKLLYIFKQPFMRPVQTTQEEDGCSCRFPEEEEGGCELRVKFSRSADAPAYQQGQNQLYNELNLGRREEYDVLDKRRGRDPEMGGKPRRKNPQEGLYNELQKDKMAEAYSEIGMKGERRRGKGHDGLYQGLSTATKDTYDALHMQALPPR

SEQ ID NO: 7619 - protein, 464 aa, Artificial Sequence
  source: /note="Description of Artificial Sequence: Synthetic Chimeric Antigen Receptor"
MALPVTALLLPLALLLHAARPQVQLQQPGAEVVKPGASVKMSCKASGYTFTSYYIHWIKQTPGQGLEWVGVIYPGNDDISYNQKFKGKATLTADKSSTTAYMQLSSLTSEDSAVYYCAREVRLRYFDVWGAGTTVTVSSGGGGSGGGGSGGGGSNIMLTQSPSSLAVSAGEKVTMSCKSSQSVFFSSSQKNYLAWYQQIPGQSPKLLIYWASTRESGVPDRFTGSGSGTDFTLTISSVQSEDLAIYYCHQYLSSRTFGGGTKLEIKRGLAVSTISSFFPPGYQIISFFLALTSTALLFLLFFLTLRFSVVKRGRKKLLYIFKQPFMRPVQTTQEEDGCSCRFPEEEEGGCELRVKFSRSADAPAYQQGQNQLYNELNLGRREEYDVLDKRRGRDPEMGGKPRRKNPQEGLYNELQKDKMAEAYSEIGMKGERRRGKGHDGLYQGLSTATKDTYDALHMQALPPR

SEQ ID NO: 7620 - protein, 490 aa, Artificial Sequence
  source: /note="Description of Artificial Sequence: Synthetic Chimeric Antigen Receptor"
MALPVTALLLPLALLLHAARPQVQLQQPGAEVVKPGASVKMSCKASGYTFTSYYIHWIKQTPGQGLEWVGVIYPGNDDISYNQKFKGKATLTADKSSTTAYMQLSSLTSEDSAVYYCAREVRLRYFDVWGAGTTVTVSSGGGGSGGGGSGGGGSNIMLTQSPSSLAVSAGEKVTMSCKSSQSVFFSSSQKNYLAWYQQIPGQSPKLLIYWASTRESGVPDRFTGSGSGTDFTLTISSVQSEDLAIYYCHQYLSSRTFGGGTKLEIKRTTTPAPRPPTPAPTIASQPLSLRPEACRPAAGGAVHTRGLDFACDIYIWAPLAGTCGVLLLSLVITLYCKRGRKKLLYIFKQPFMRPVQTTQEEDGCSCRFPEEEEGGCELRVKFSRSADAPAYQQGQNQLYNELNLGRREEYDVLDKRRGRDPEMGGKPRRKNPQEGLYNELQKDKMAEAYSEIGMKGERRRGKGHDGLYQGLSTATKDTYDALHMQALPPR

SEQ ID NO: 7621 - protein, 493 aa, Artificial Sequence
  source: /note="Description of Artificial Sequence: Synthetic Chimeric Antigen Receptor"
MALPVTALLLPLALLLHAARPQVQLQQPGAEVVKPGASVKMSCKASGYTFTSYYIHWIKQTPGQGLEWVGVIYPGNDDISYNQKFKGKATLTADKSSTTAYMQLSSLTSEDSAVYYCAREVRLRYFDVWGAGTTVTVSSGGGGSGGGGSGGGGSNIMLTQSPSSLAVSAGEKVTMSCKSSQSVFFSSSQKNYLAWYQQIPGQSPKLLIYWASTRESGVPDRFTGSGSGTDFTLTISSVQSEDLAIYYCHQYLSSRTFGGGTKLEIKRTTTPAPRPPTPAPTIASQPLSLRPEACRPAAGGAVHTRGLDFACDIISFFLALTSTALLFLLFFLTLRFSVVKRGRKKLLYIFKQPFMRPVQTTQEEDGCSCRFPEEEEGGCELRVKFSRSADAPAYQQGQNQLYNELNLGRREEYDVLDKRRGRDPEMGGKPRRKNPQEGLYNELQKDKMAEAYSEIGMKGERRRGKGHDGLYQGLSTATKDTYDALHMQALPPR

SEQ ID NO: 7622 - protein, 676 aa, Artificial Sequence
  source: /note="Description of Artificial Sequence: Synthetic Chimeric Antigen Receptor"
MALPVTALLLPLALLLHAARPQVQLQQPGAEVVKPGASVKMSCKASGYTFTSYYIHWIKQTPGQGLEWVGVIYPGNDDISYNQKFKGKATLTADKSSTTAYMQLSSLTSEDSAVYYCAREVRLRYFDVWGAGTTVTVSSGGGGSGGGGSGGGGSNIMLTQSPSSLAVSAGEKVTMSCKSSQSVFFSSSQKNYLAWYQQIPGQSPKLLIYWASTRESGVPDRFTGSGSGTDFTLTISSVQSEDLAIYYCHQYLSSRTFGGGTKLEIKREPKSPDKTHTCPPCPAPPVAGPSVFLFPPKPKDTLMIARTPEVTCVVVDVSHEDPEVKFNWYVDGVEVHNAKTKPREEQYNSTYRVVSVLTVLHQDWLNGKEYKCKVSNKALPAPIEKTISKAKGQPREPQVYTLPPSRDELTKNQVSLTCLVKGFYPSDIAVEWESNGQPENNYKTTPPVLDSDGSFFLYSKLTVDKSRWQQGNVFSCSVMHEALHNHYTQKSLSLSPGKIYIWAPLAGTCGVLLLSLVITLYCKRGRKKLLYIFKQPFMRPVQTTQEEDGCSCRFPEEEEGGCELRVKFSRSADAPAYQQGQNQLYNELNLGRREEYDVLDKRRGRDPEMGGKPRRKNPQEGLYNELQKDKMAEAYSEIGMKGERRRGKGHDGLYQGLSTATKDTYDALHMQALPPR

SEQ ID NO: 7623 - protein, 679 aa, Artificial Sequence
  source: /note="Description of Artificial Sequence: Synthetic Chimeric Antigen Receptor"
MALPVTALLLPLALLLHAARPQVQLQQPGAEVVKPGASVKMSCKASGYTFTSYYIHWIKQTPGQGLEWVGVIYPGNDDISYNQKFKGKATLTADKSSTTAYMQLSSLTSEDSAVYYCAREVRLRYFDVWGAGTTVTVSSGGGGSGGGGSGGGGSNIMLTQSPSSLAVSAGEKVTMSCKSSQSVFFSSSQKNYLAWYQQIPGQSPKLLIYWASTRESGVPDRFTGSGSGTDFTLTISSVQSEDLAIYYCHQYLSSRTFGGGTKLEIKREPKSPDKTHTCPPCPAPPVAGPSVFLFPPKPKDTLMIARTPEVTCVVVDVSHEDPEVKFNWYVDGVEVHNAKTKPREEQYNSTYRVVSVLTVLHQDWLNGKEYKCKVSNKALPAPIEKTISKAKGQPREPQVYTLPPSRDELTKNQVSLTCLVKGFYPSDIAVEWESNGQPENNYKTTPPVLDSDGSFFLYSKLTVDKSRWQQGNVFSCSVMHEALHNHYTQKSLSLSPGKIISFFLALTSTALLFLLFFLTLRFSVVKRGRKKLLYIFKQPFMRPVQTTQEEDGCSCRFPEEEEGGCELRVKFSRSADAPAYQQGQNQLYNELNLGRREEYDVLDKRRGRDPEMGGKPRRKNPQEGLYNELQKDKMAEAYSEIGMKGERRRGKGHDGLYQGLSTATKDTYDALHMQALPPR

SEQ ID NO: 7624 - protein, 442 aa, Artificial Sequence
  source: /note="Description of Artificial Sequence: Synthetic Chimeric Antigen Receptor"
PLALLLHAARPEVQLLESGGGLVQPGGSLRLSCAVSGFTFNSFAMSWVRQAPGKGLEWVSAISGSGGGTYYADSVKGRFTISRDNSKNTLYLQMNSLRAEDTAVYFCAKDKILWFGEPVFDYWGQGTLVTVSSASGGGGSGGGGSGGGGSEIVLTQSPATLSLSPGERATLSCRASQSVSSYLAWYQQKPGQAPRLLIYDASNRATGIPARFSGSGSGTDFTLTISSLEPEDFAVYYCQQRSNWPPTFGQGTKVEIKGLAVSTISSFFPPGYQIYIWAPLAGTCGVLLLSLVITLYCKRGRKKLLYIFKQPFMRPVQTTQEEDGCSCRFPEEEEGGCELRVKFSRSADAPAYQQGQNQLYNELNLGRREEYDVLDKRRGRDPEMGGKPRRKNPQEGLYNELQKDKMAEAYSEIGMKGERRRGKGHDGLYQGLSTATKDTYDA

SEQ ID NO: 7625 - protein, 491 aa, Artificial Sequence
  source: /note="Description of Artificial Sequence: Synthetic Chimeric Antigen Receptor"
MALPVTALLLPLALLLHAARPQAYLQQSGAELVRSGASVKMSCKASGYTFTSYNLHWVKQTPGQGLEWIGYIYPGNGGTNYNQKFKGKATLTADTSSSTAYMQISSLTSEDSAVYFCARGGIYYYGSSLDYWGQGTTLTVSSGGGGSGGGGSGGGGSNIVLTQSPASLAVSLGQRATISCRASESVDNYGTTFMYWYQQKPGQPPKLLIYLASNLESGVPARFSGSGSGTDFTLTIDPVEADDAATYYCQQNKEDPWTFGGGTKLEIKTTTPAPRPPTPAPTIASQPLSLRPEACRPAAGGAVHTRGLDFACDIYIWAPLAGTCGVLLLSLVITLYCKRGRKKLLYIFKQPFMRPVQTTQEEDGCSCRFPEEEEGGCELRVKFSRSADAPAYQQGQNQLYNELNLGRREEYDVLDKRRGRDPEMGGKPRRKNPQEGLYNELQKDKMAEAYSEIGMKGERRRGKGHDGLYQGLSTATKDTYDALHMQALPPR

SEQ ID NO: 7626 - protein, 677 aa, Artificial Sequence
  source: /note="Description of Artificial Sequence: Synthetic Chimeric Antigen Receptor"
MALPVTALLLPLALLLHAARPQAYLQQSGAELVRSGASVKMSCKASGYTFTSYNLHWVKQTPGQGLEWIGYIYPGNGGTNYNQKFKGKATLTADTSSSTAYMQISSLTSEDSAVYFCARGGIYYYGSSLDYWGQGTTLTVSSGGGGSGGGGSGGGGSNIVLTQSPASLAVSLGQRATISCRASESVDNYGTTFMYWYQQKPGQPPKLLIYLASNLESGVPARFSGSGSGTDFTLTIDPVEADDAATYYCQQNKEDPWTFGGGTKLEIKEPKSPDKTHTCPPCPAPPVAGPSVFLFPPKPKDTLMIARTPEVTCVVVDVSHEDPEVKFNWYVDGVEVHNAKTKPREEQYNSTYRVVSVLTVLHQDWLNGKEYKCKVSNKALPAPIEKTISKAKGQPREPQVYTLPPSRDELTKNQVSLTCLVKGFYPSDIAVEWESNGQPENNYKTTPPVLDSDGSFFLYSKLTVDKSRWQQGNVFSCSVMHEALHNHYTQKSLSLSPGKIYIWAPLAGTCGVLLLSLVITLYCKRGRKKLLYIFKQPFMRPVQTTQEEDGCSCRFPEEEEGGCELRVKFSRSADAPAYQQGQNQLYNELNLGRREEYDVLDKRRGRDPEMGGKPRRKNPQEGLYNELQKDKMAEAYSEIGMKGERRRGKGHDGLYQGLSTATKDTYDALHMQALPPR

SEQ ID NO: 7627 - protein, 472 aa, Artificial Sequence
  source: /note="Description of Artificial Sequence: Synthetic Chimeric Antigen Receptor"
MALPVTALLLPLALLLHAARPPLALLLHAARPEVQLQQSGAELVRPGASVKLSCTASGFNIKDSLIHWVKQRPEQGLEWIGWIDPEDDKTKYAPKFQDKATLTADTSSNTAYLQLSTLTSEDTAIYYCVSRYINYYFAYWGQGTTLTVSSGGGGSGGGGSGGGGSDIVMTQSPSSLTVTAGEKVTMSCKSSQSLLHSGNQRNYLTWYQQKPGQPPKLLIYWASTRESGVPDRFTGSGSGTDFTLTISSVQAEDLAVYYCQNDYDYPYTFGGGTKLEIKGLAVSTISSFFPPGYQIYIWAPLAGTCGVLLLSLVITLYCKRGRKKLLYIFKQPFMRPVQTTQEEDGCSCRFPEEEEGGCELRVKFSRSADAPAYQQGQNQLYNELNLGRREEYDVLDKRRGRDPEMGGKPRRKNPQEGLYNELQKDKMAEAYSEIGMKGERRRGKGHDGLYQGLSTATKDTYDALHMQALPPR

SEQ ID NO: 7628 - protein, 490 aa, Artificial Sequence
  source: /note="Description of Artificial Sequence: Synthetic Chimeric Antigen Receptor"
MALPVTALLLPLALLLHAARPEVQLQQSGAELVRPGASVKLSCTASGFNIKDSLIHWVKQRPEQGLEWIGWIDPEDDKTKYAPKFQDKATLTADTSSNTAYLQLSTLTSEDTAIYYCVSRYINYYFAYWGQGTTLTVSSGGGGSGGGGSGGGGSDIVMTQSPSSLTVTAGEKVTMSCKSSQSLLHSGNQRNYLTWYQQKPGQPPKLLIYWASTRESGVPDRFTGSGSGTDFTLTISSVQAEDLAVYYCQNDYDYPYTFGGGTKLEIKTTTPAPRPPTPAPTIASQPLSLRPEACRPAAGGAVHTRGLDFACDIYIWAPLAGTCGVLLLSLVITLYCKRGRKKLLYIFKQPFMRPVQTTQEEDGCSCRFPEEEEGGCELRVKFSRSADAPAYQQGQNQLYNELNLGRREEYDVLDKRRGRDPEMGGKPRRKNPQEGLYNELQKDKMAEAYSEIGMKGERRRGKGHDGLYQGLSTATKDTYDALHMQALPPR

SEQ ID NO: 7629 - protein, 676 aa, Artificial Sequence
  source: /note="Description of Artificial Sequence: Synthetic Chimeric Antigen Receptor"
MALPVTALLLPLALLLHAARPEVQLQQSGAELVRPGASVKLSCTASGFNIKDSLIHWVKQRPEQGLEWIGWIDPEDDKTKYAPKFQDKATLTADTSSNTAYLQLSTLTSEDTAIYYCVSRYINYYFAYWGQGTTLTVSSGGGGSGGGGSGGGGSDIVMTQSPSSLTVTAGEKVTMSCKSSQSLLHSGNQRNYLTWYQQKPGQPPKLLIYWASTRESGVPDRFTGSGSGTDFTLTISSVQAEDLAVYYCQNDYDYPYTFGGGTKLEIKEPKSPDKTHTCPPCPAPPVAGPSVFLFPPKPKDTLMIARTPEVTCVVVDVSHEDPEVKFNWYVDGVEVHNAKTKPREEQYNSTYRVVSVLTVLHQDWLNGKEYKCKVSNKALPAPIEKTISKAKGQPREPQVYTLPPSRDELTKNQVSLTCLVKGFYPSDIAVEWESNGQPENNYKTTPPVLDSDGSFFLYSKLTVDKSRWQQGNVFSCSVMHEALHNHYTQKSLSLSPGKIYIWAPLAGTCGVLLLSLVITLYCKRGRKKLLYIFKQPFMRPVQTTQEEDGCSCRFPEEEEGGCELRVKFSRSADAPAYQQGQNQLYNELNLGRREEYDVLDKRRGRDPEMGGKPRRKNPQEGLYNELQKDKMAEAYSEIGMKGERRRGKGHDGLYQGLSTATKDTYDALHMQALPPR

SEQ ID NO: 7630 - protein, 464 aa, Artificial Sequence
  source: /note="Description of Artificial Sequence: Synthetic Chimeric Antigen Receptor"
MALPVTALLLPLALLLHAARPQIQLVQSGPELKKPGETVKISCKASGYTFTKYGMNWVKQTPGKGLKWMGWINTNSGEPTYAEEFKGRFAFSLETSASTAYLQINNLKNEDTATYFCARGAYYRYDGEVSYYAMDYWGQGTSVTVSSGGGGSGGGGSGGGGSQIILTQSPAIMSASLGERVTMTCTATSSLSSSYLHWYQQKPGSSPKLWIYSTSHLASGVPARFSGGGSGTSYSLTISSMEAEDAATYYCHQYHLSPYTFGGGTKLEIKGLAVSTISSFFPPGYQIYIWAPLAGTCGVLLLSLVITLYCKRGRKKLLYIFKQPFMRPVQTTQEEDGCSCRFPEEEEGGCELRVKFSRSADAPAYQQGQNQLYNELNLGRREEYDVLDKRRGRDPEMGGKPRRKNPQEGLYNELQKDKMAEAYSEIGMKGERRRGKGHDGLYQGLSTATKDTYDALHMQALPPR

SEQ ID NO: 7631 - protein, 493 aa, Artificial Sequence
  source: /note="Description of Artificial Sequence: Synthetic Chimeric Antigen Receptor"
MALPVTALLLPLALLLHAARPQIQLVQSGPELKKPGETVKISCKASGYTFTKYGMNWVKQTPGKGLKWMGWINTNSGEPTYAEEFKGRFAFSLETSASTAYLQINNLKNEDTATYFCARGAYYRYDGEVSYYAMDYWGQGTSVTVSSGGGGSGGGGSGGGGSQIILTQSPAIMSASLGERVTMTCTATSSLSSSYLHWYQQKPGSSPKLWIYSTSHLASGVPARFSGGGSGTSYSLTISSMEAEDAATYYCHQYHLSPYTFGGGTKLEIKTTTPAPRPPTPAPTIASQPLSLRPEACRPAAGGAVHTRGLDFACDIYIWAPLAGTCGVLLLSLVITLYCKRGRKKLLYIFKQPFMRPVQTTQEEDGCSCRFPEEEEGGCELRVKFSRSADAPAYQQGQNQLYNELNLGRREEYDVLDKRRGRDPEMGGKPRRKNPQEGLYNELQKDKMAEAYSEIGMKGERRRGKGHDGLYQGLSTATKDTYDALHMQALPPR

SEQ ID NO: 7632 - protein, 679 aa, Artificial Sequence
  source: /note="Description of Artificial Sequence: Synthetic Chimeric Antigen Receptor"
MALPVTALLLPLALLLHAARPQIQLVQSGPELKKPGETVKISCKASGYTFTKYGMNWVKQTPGKGLKWMGWINTNSGEPTYAEEFKGRFAFSLETSASTAYLQINNLKNEDTATYFCARGAYYRYDGEVSYYAMDYWGQGTSVTVSSGGGGSGGGGSGGGGSQIILTQSPAIMSASLGERVTMTCTATSSLSSSYLHWYQQKPGSSPKLWIYSTSHLASGVPARFSGGGSGTSYSLTISSMEAEDAATYYCHQYHLSPYTFGGGTKLEIKEPKSPDKTHTCPPCPAPPVAGPSVFLFPPKPKDTLMIARTPEVTCVVVDVSHEDPEVKFNWYVDGVEVHNAKTKPREEQYNSTYRVVSVLTVLHQDWLNGKEYKCKVSNKALPAPIEKTISKAKGQPREPQVYTLPPSRDELTKNQVSLTCLVKGFYPSDIAVEWESNGQPENNYKTTPPVLDSDGSFFLYSKLTVDKSRWQQGNVFSCSVMHEALHNHYTQKSLSLSPGKIYIWAPLAGTCGVLLLSLVITLYCKRGRKKLLYIFKQPFMRPVQTTQEEDGCSCRFPEEEEGGCELRVKFSRSADAPAYQQGQNQLYNELNLGRREEYDVLDKRRGRDPEMGGKPRRKNPQEGLYNELQKDKMAEAYSEIGMKGERRRGKGHDGLYQGLSTATKDTYDALHMQALPPR

SEQ ID NO: 7633 - protein, 488 aa, Artificial Sequence
  source: /note="Description of Artificial Sequence: Synthetic Chimeric Antigen Receptor"
MALPVTALLLPLALLLHAARPQIQLVQSGPEVKKPGETVKISCKASGYTFTNYGMNWVKQAPGKGLKWMGINTYTGEPTYADAFKGRFAFSLETSASTAYLQINNLKNEDTATYFCARDYGDYGMDYWGQGTSVTVSSGGGGSGGGGSGGGGSDIVLTQSPASLAVSLGQRATISCRASKSVSTSGYSFMHWYQQKPGQPPKLLIYLASNLESGVPARFSGSGSGTDFTLNIHPVEEEDAATYYCQHSREVPWTFGGGTKLEIKRTTTPAPRPPTPAPTIASQPLSLRPEACRPAAGGAVHTRGLDFACDIYIWAPLAGTCGVLLLSLVITLYCKRGRKKLLYIFKQPFMRPVQTTQEEDGCSCRFPEEEEGGCELRVKFSRSADAPAYQQGQNQLYNELNLGRREEYDVLDKRRGRDPEMGGKPRRKNPQEGLYNELQKDKMAEAYSEIGMKGERRRGKGHDGLYQGLSTATKDTYDALHMQALPPR

SEQ ID NO: 7634 - protein, 471 aa, Artificial Sequence
  source: /note="Description of Artificial Sequence: Synthetic Chimeric Antigen Receptor"
PLALLLHAARPEVQLLESGGGLVQPGGSLRLSCAVSGFTFNSFAMSWVRQAPGKGLEWVSAISGSGGGTYYADSVKGRFTISRDNSKNTLYLQMNSLRAEDTAVYFCAKDKILWFGEPVFDYWGQGTLVTVSSASGGGGSGGGGSGGGGSEIVLTQSPATLSLSPGERATLSCRASQSVSSYLAWYQQKPGQAPRLLIYDASNRATGIPARFSGSGSGTDFTLTISSLEPEDFAVYYCQQRSNWPPTFGQGTKVEIKTTTPAPRPPTPAPTIASQPLSLRPEACRPAAGGAVHTRGLDFACDIYIWAPLAGTCGVLLLSLVITLYCKRGRKKLLYIFKQPFMRPVQTTQEEDGCSCRFPEEEEGGCELRVKFSRSADAPAYQQGQNQLYNELNLGRREEYDVLDKRRGRDPEMGGKPRRKNPQEGLYNELQKDKMAEAYSEIGMKGERRRGKGHDGLYQGLSTATKDTYDA

SEQ ID NO: 7635 - protein, 657 aa, Artificial Sequence [sequence omitted]

SEQ ID NO: 7636 - protein, 535 aa, Artificial Sequence
  source: /note="Description of Artificial Sequence: Synthetic Chimeric Antigen Receptor"
MALPVTALLLPLALLLHAARPDIVMTQSPDSLAVSLGERVTMNCKSSQSLLYSTNQKNYLAWYQQKPGQSPKLLIYWASTRESGVPDRFSGSGSGTDFTLTISSVQAEDVAVYYCQQYYSYRTFGGGTKLEIKGGGGSGGGGSGGGGSQVQLQQSGPEVVKPGASVKMSCKASGYTFTSYVIHWVRQKPGQGLDWIGYINPYNDGTDYDEKFKGKATLTSDTSTSTAYMELSSLRSEDTAVYYCAREKDNYATGAWFAYWGQGTLVTVSSTTTPAPRPPTPAPTIASQPLSLRPEACRPAAGGAVHTRGLDFACDIYIWAPLAGTCGVLLLSLVITLYCRSKRSRLLHSDYMNMTPRRPGPTRKHYQPYAPPRDFAAYRSKRGRKKLLYIFKQPFMRPVQTTQEEDGCSCRFPEEEEGGCELRVKFSRSADAPAYQQGQNQLYNELNLGRREEYDVLDKRRGRDPEMGGKPQRRKNPQEGLYNELQKDKMAEAYSEIGMKGERRRGKGHDGLYQGLSTATKDTYDALHMQALPPR

SEQ ID NO: 7637 - protein, 536 aa, Artificial Sequence
  source: /note="Description of Artificial Sequence: Synthetic Chimeric Antigen Receptor"
MALPVTALLLPLALLLHAARPDIVMTQSPDSLAVSLGERATINCRASKSVSTSGYSYIYWYQQKPGQPPKLLIYLASILESGVPDRFSGSGSGTDFTLTISSLQAEDVAVYYCQHSRELPWTFGQGTKVEIKGGGGSGGGGSGGGGSEEQLVESGGGLVKPGGSLRLSCAASGFSFSDCRMYWLRQAPGKGLEWIGVISVKSENYGANYAESVRGRFTISRDDSKNTVYLQMNSLKTEDTAVYYCSASYYRYDVGAWFAYWGQGTLVTVSSTTTPAPRPPTPAPTIASQPLSLRPEACRPAAGGAVHTRGLDFACDIYIWAPLAGTCGVLLLSLVITLYCRSKRSRLLHSDYMNMTPRRPGPTRKHYQPYAPPRDFAAYRSKRGRKKLLYIFKQPFMRPVQTTQEEDGCSCRFPEEEEGGCELRVKFSRSADAPAYQQGQNQLYNELNLGRREEYDVLDKRRGRDPEMGGKPQRRKNPQEGLYNELQKDKMAEAYSEIGMKGERRRGKGHDGLYQGLSTATKDTYDALHMQALPPR

SEQ ID NO: 7638 - protein, 692 aa, Artificial Sequence
  source: /note="Description of Artificial Sequence: Synthetic Chimeric Antigen Receptor"
MVRGVPFRHLLLVLQLALLPAATQGKKVVLGKKGDTVELTCTASQKKSIQFHWKNSNQIKILGNQGSFLTKGPSKLNDRADSRRSLWDQGNFPLIIKNLKIEDSDTYICEVEDQKEEVQLLVFGLTANSDTHLLQGQSLTLTLESPPGSSPSVQCRSPRGKNIQGGKTLSVSQLELQDSGTWTCTVLQNQKKVEFKIDIVVLAFQKASGGGGSGGGGSQVQLLESGAEVKKPGSSVKVSCKASGDTFIRYSFTWVRQAPGQGLEWMGRIITILDVAHYAPHLQGRVTITADKSTSTVYLELRNLRSDDTAVYFCAGVYEGEADEGEYDNNGFLKHWGQGTLVTVTSGGGGSGGGGSGGGGSELELTQSPATLSVSPGERATLSCRASESVSSDLAWYQQKPGQAPRLLIYGASTRATGVPARFSGSGSGAEFTLTISSLQSEDFAVYYCQQYNNWPPRYTFGQGTRLEIKAAAIEVMYPPPYLDNEKSNGTIIHVKGKHLCPSPLFPGPSKPFWVLVVVGGVLACYSLLVTVAFIIFWVRSKRSRLLHSDYMNMTPRRPGPTRKHYQPYAPPRDFAAYRSRVKFSRSADAPAYQQGQNQLYNELNLGRREEYDVLDKRRGRDPEMGGKPRRKNPQEGLYNELQKDKMAEAYSEIGMKGERRRGKGHDGLYQGLSTATKDTYDALHMQALPPR

SEQ ID NO: 7639 - protein, 717 aa, Artificial Sequence [sequence omitted]

SEQ ID NO: 7640 - protein, 669 aa, Artificial Sequence
  source: /note="Description of Artificial Sequence: Synthetic Chimeric Antigen Receptor"
MEAPAQLLFLLLLWLPDTTGEIVLTQSPATLSLSPGERATLSCSASSSINYIYWLQQKPGQAPRILIYLTSNLASGVPARFSGSGSGTDFTLTISSLEPEDFAVYYCLQWSSNPLTFGGGTKVEIKRGGGGSGGGGSGGGGSGGGGSEVQLVESGGGLVKPGGSLRLSCAASGFTFSSYDMSWVRQAPGKGLEWVSTISSGGSYTYYLDSIKGRFTISRDNAKNSLYLQMNSLRAEDTAVYYCARQGLDYWGRGTLVTVSSGDPKEACPTGLYTHSGECCKACNLGEGVAQPCGANQTVCEPCLDSVTFSDVVSATEPCKPCTECVGLQSMSAPCVEADDAVCRCAYGYYQDETTGRCEACRVCEAGSGLVFSCQDKQNTVCEECPDGTYSDEANHVDPCLPCTVCEDTERQLRECTRWADAECEEIPGRWITRSTPPEGSDSTAPSTQEPEAPPEQDLIASTVAGVVTTVMGSSQPVVTRGTTDNPKFWVLVVVGGVLACYSLLVTVAFIIFWVRSKRSRLLHSDYMNMTPRRPGPTRKHYQPYAPPRDFAAYRSRVKFSRSADAPAYQQGQNQLYNELNLGRREEYDVLDKRRGRDPEMGGKPQRRKNPQEGLYNELQKDKMAEAYSEIGMKGERRRGKGHDGLYQGLSTATKDTYDALHMQALPPR

SEQ ID NO: 7641 - protein, 609 aa, Artificial Sequence
  source: /note="Description of Artificial Sequence: Synthetic Chimeric Antigen Receptor"
MEAPAQLLFLLLLWLPDTTGEIVLTQSPATLSLSPGERATLSCSASSSINYIYWLQQKPGQAPRILIYLTSNLASGVPARFSGSGSGTDFTLTISSLEPEDFAVYYCLQWSSNPLTFGGGTKVEIKRGGGGSGGGGSGGGGSGGGGSEVQLVESGGGLVKPGGSLRLSCAASGFTFSSYDMSWVRQAPGKGLEWVSTISSGGSYTYYLDSIKGRFTISRDNAKNSLYLQMNSLRAEDTAVYYCARQGLDYWGRGTLVTVSSGDPKEACPTGLYTHSGECCKACNLGEGVAQPCGANQTVCEPCLDSVTFSDVVSATEPCKPCTECVGLQSMSAPCVEADDAVCRCAYGYYQDETTGRCEACRVCEAGSGLVFSCQDKQNTVCEECPDGTYSDEANHVDPCLPCTVCEDTERQLRECTRWADAECEEPKFWVLVVVGGVLACYSLLVTVAFIIFWVRSKRSRLLHSDYMNMTPRRPGPTRKHYQPYAPPRDFAAYRSRVKFSRSADAPAYQQGQNQLYNELNLGRREEYDVLDKRRGRDPEMGGKPQRRKNPQEGLYNELQKDKMAEAYSEIGMKGERRRGKGHDGLYQGLSTATKDTYDALHMQALPPR

SEQ ID NO: 7642 - protein, 647 aa, Artificial Sequence
  source: /note="Description of Artificial Sequence: Synthetic Chimeric Antigen Receptor"
MEAPAQLLFLLLLWLPDTTGEIVLTQSPATLSLSPGERATLSCSASSSINYIYWLQQKPGQAPRILIYLTSNLASGVPARFSGSGSGTDFTLTISSLEPEDFAVYYCLQWSSNPLTFGGGTKVEIKRGGGGSGGGGSGGGGSGGGGSEVQLVESGGGLVKPGGSLRLSCAASGFTFSSYDMSWVRQAPGKGLEWVSTISSGGSYTYYLDSIKGRFTISRDNAKNSLYLQMNSLRAEDTAVYYCARQGLDYWGRGTLVTVSSGDPKEACPTGLYTHSGECCKACNLGEGVAQPCGANQTVCEPCLDSVTFSDVVSATEPCKPCTECVGLQSMSAPCVEADDAVCRCAYGYYQDETTGRCEACRVCEAGSGLVFSCQDKQNTVCEECPDGTYSDEAARAADAECEEIPGRWITRSTPPEGSDSTAPSTQEPEAPPEQDLIASTVAGVVTTVMGSSQPVVTRGTTDNPKFWVLVVVGGVLACYSLLVTVAFIIFWVRSKRSRLLHSDYMNMTPRRPGPTRKHYQPYAPPRDFAAYRSRVKFSRSADAPAYQQGQNQLYNELNLGRREEYDVLDKRRGRDPEMGGKPQRRKNPQEGLYNELQKDKMAEAYSEIGMKGERRRGKGHDGLYQGLSTATKDTYDALHMQALPPR

SEQ ID NO: 7643 - protein, 587 aa, Artificial Sequence
  source: /note="Description of Artificial Sequence: Synthetic Chimeric Antigen Receptor"
MEAPAQLLFLLLLWLPDTTGEIVLTQSPATLSLSPGERATLSCSASSSINYIYWLQQKPGQAPRILIYLTSNLASGVPARFSGSGSGTDFTLTISSLEPEDFAVYYCLQWSSNPLTFGGGTKVEIKRGGGGSGGGGSGGGGSGGGGSEVQLVESGGGLVKPGGSLRLSCAASGFTFSSYDMSWVRQAPGKGLEWVSTISSGGSYTYYLDSIKGRFTISRDNAKNSLYLQMNSLRAEDTAVYYCARQGLDYWGRGTLVTVSSGDPKEACPTGLYTHSGECCKACNLGEGVAQPCGANQTVCEPCLDSVTFSDVVSATEPCKPCTECVGLQSMSAPCVEADDAVCRCAYGYYQDETTGRCEACRVCEAGSGLVFSCQDKQNTVCEECPDGTYSDEAARAADAECEEPKFWVLVVVGGVLACYSLLVTVAFIIFWVRSKRSRLLHSDYMNMTPRRPGPTRKHYQPYAPPRDFAAYRSRVKFSRSADAPAYQQGQNQLYNELNLGRREEYDVLDKRRGRDPEMGGKPQRRKNPQEGLYNELQKDKMAEAYSEIGMKGERRRGKGHDGLYQGLSTATKDTYDALHMQALPPR

SEQ ID NO: 7644 - protein, 668 aa, Artificial Sequence
  source: /note="Description of Artificial Sequence: Synthetic Chimeric Antigen Receptor"
MEAPAQLLFLLLLWLPDTTGEIVLTQSPATLSLSPGERATLSCSASSSINYIYWLQQKPGQAPRILIYLTSNLASGVPARFSGSGSGTDFTLTISSLEPEDFAVYYCLQWSSNPLTFGGGTKVEIKRGGGGSGGGGSGGGGSGGGGSEVQLVESGGGLVKPGGSLRLSCAASGFTFSSYDMSWVRQAPGKGLEWVSTISSGGSYTYYLDSIKGRFTISRDNAKNSLYLQMNSLRAEDTAVYYCARQGLDYWGRGTLVTVSSGDPKEACPTGLYTHSGECCKACNLGEGVAQPCGANQTVCEPCLDSVTFSDVVSATEPCKPCTECVGLQSMSAPCVEADDAVCRCAYGYYQDETTGRCEACRVCEAGSGLVFSCQDKQNTVCEECPDGTYSDEANHVDPCLPCTVCEDTERQLRECTRWADAECEEIPGRWITRSTPPEGSDSTAPSTQEPEAPPEQDLIASTVAGVVTTVMGSSQPVVTRGTTDNPKFWVLVVVGGVLACYSLLVTVAFIIFWVRSKRSRLLHSDYMNMTPRRPGPTRKHYQPYAPPRDFAAYRSRVKFSRSADAPAYQQGQNQLYNELNLGRREEYDVLDKRRGRDPEMGGKPRRKNPQEGLYNELQKDKMAEAYSEIGMKGERRRGKGHDGLYQGLSTATKDTYDALHMQALPPR

SEQ ID NO: 7645 - protein, 608 aa, Artificial Sequence
  source: /note="Description of Artificial Sequence: Synthetic Chimeric Antigen Receptor"
MEAPAQLLFLLLLWLPDTTGEIVLTQSPATLSLSPGERATLSCSASSSINYIYWLQQKPGQAPRILIYLTSNLASGVPARFSGSGSGTDFTLTISSLEPEDFAVYYCLQWSSNPLTFGGGTKVEIKRGGGGSGGGGSGGGGSGGGGSEVQLVESGGGLVKPGGSLRLSCAASGFTFSSYDMSWVRQAPGKGLEWVSTISSGGSYTYYLDSIKGRFTISRDNAKNSLYLQMNSLRAEDTAVYYCARQGLDYWGRGTLVTVSSGDPKEACPTGLYTHSGECCKACNLGEGVAQPCGANQTVCEPCLDSVTFSDVVSATEPCKPCTECVGLQSMSAPCVEADDAVCRCAYGYYQDETTGRCEACRVCEAGSGLVFSCQDKQNTVCEECPDGTYSDEANHVDPCLPCTVCEDTERQLRECTRWADAECEEPKFWVLVVVGGVLACYSLLVTVAFIIFWVRSKRSRLLHSDYMNMTPRRPGPTRKHYQPYAPPRDFAAYRSRVKFSRSADAPAYQQGQNQLYNELNLGRREEYDVLDKRRGRDPEMGGKPRRKNPQEGLYNELQKDKMAEAYSEIGMKGERRRGKGHDGLYQGLSTATKDTYDALHMQALPPR

SEQ ID NO: 7646 - protein, 646 aa, Artificial Sequence
  source: /note="Description of Artificial Sequence: Synthetic Chimeric Antigen Receptor"
MEAPAQLLFLLLLWLPDTTGEIVLTQSPATLSLSPGERATLSCSASSSINYIYWLQQKPGQAPRILIYLTSNLASGVPARFSGSGSGTDFTLTISSLEPEDFAVYYCLQWSSNPLTFGGGTKVEIKRGGGGSGGGGSGGGGSGGGGSEVQLVESGGGLVKPGGSLRLSCAASGFTFSSYDMSWVRQAPGKGLEWVSTISSGGSYTYYLDSIKGRFTISRDNAKNSLYLQMNSLRAEDTAVYYCARQGLDYWGRGTLVTVSSGDPKEACPTGLYTHSGECCKACNLGEGVAQPCGANQTVCEPCLDSVTFSDVVSATEPCKPCTECVGLQSMSAPCVEADDAVCRCAYGYYQDETTGRCEACRVCEAGSGLVFSCQDKQNTVCEECPDGTYSDEAARAADAECEEIPGRWITRSTPPEGSDSTAPSTQEPEAPPEQDLIASTVAGVVTTVMGSSQPVVTRGTTDNPKFWVLVVVGGVLACYSLLVTVAFIIFWVRSKRSRLLHSDYMNMTPRRPGPTRKHYQPYAPPRDFAAYRSRVKFSRSADAPAYQQGQNQLYNELNLGRREEYDVLDKRRGRDPEMGGKPRRKNPQEGLYNELQKDKMAEAYSEIGMKGERRRGKGHDGLYQGLSTATKDTYDALHMQALPPR

SEQ ID NO: 7647 - protein, 586 aa, Artificial Sequence
  source: /note="Description of Artificial Sequence: Synthetic Chimeric Antigen Receptor"
MEAPAQLLFLLLLWLPDTTGEIVLTQSPATLSLSPGERATLSCSASSSINYIYWLQQKPGQAPRILIYLTSNLASGVPARFSGSGSGTDFTLTISSLEPEDFAVYYCLQWSSNPLTFGGGTKVEIKRGGGGSGGGGSGGGGSGGGGSEVQLVESGGGLVKPGGSLRLSCAASGFTFSSYDMSWVRQAPGKGLEWVSTISSGGSYTYYLDSIKGRFTISRDNAKNSLYLQMNSLRAEDTAVYYCARQGLDYWGRGTLVTVSSGDPKEACPTGLYTHSGECCKACNLGEGVAQPCGANQTVCEPCLDSVTFSDVVSATEPCKPCTECVGLQSMSAPCVEADDAVCRCAYGYYQDETTGRCEACRVCEAGSGLVFSCQDKQNTVCEECPDGTYSDEAARAADAECEEPKFWVLVVVGGVLACYSLLVTVAFIIFWVRSKRSRLLHSDYMNMTPRRPGPTRKHYQPYAPPRDFAAYRSRVKFSRSADAPAYQQGQNQLYNELNLGRREEYDVLDKRRGRDPEMGGKPRRKNPQEGLYNELQKDKMAEAYSEIGMKGERRRGKGHDGLYQGLSTATKDTYDALHMQALPPR

SEQ ID NO: 7648 - protein, 251 aa, Artificial Sequence
  source: /note="Description of Artificial Sequence: Synthetic Chimeric Antigen Receptor"
MEAPAQLLFLLLLWLPDTTGEIVLTQSPATLSLSPGERATLSCSASSSINYIYWLQQKPGQAPRILIYLTSNLASGVPARFSGSGSGTDFTLTISSLEPEDFAVYYCLQWSSNPLTFGGGTKVEIKRGGGGSGGGGSEVQLVESGGGLVKPGGSLRLSCAASGFTFSSYDMSWVRQAPGKGLEWVSTISSGGSYTYYLDSIKGRFTISRDNAKNSLYLQMNSLRAEDTAVYYCARQGLDYWGRGTLVTVSS

SEQ ID NO: 7649 - protein, 658 aa, Artificial Sequence
  source: /note="Description of Artificial Sequence: Synthetic Chimeric Antigen Receptor"
MEAPAQLLFLLLLWLPDTTGEIVLTQSPATLSLSPGERATLSCSASSSINYIYWLQQKPGQAPRILIYLTSNLASGVPARFSGSGSGTDFTLTISSLEPEDFAVYYCLQWSSNPLTFGGGTKVEIKRGGGGSGGGGSEVQLVESGGGLVKPGGSLRLSCAASGFTFSSYDMSWVRQAPGKGLEWVSTISSGGSYTYYLDSIKGRFTISRDNAKNSLYLQMNSLRAEDTAVYYCARQGLDYWGRGTLVTVSSGDPKEACPTGLYTHSGECCKACNLGEGVAQPCGANQTVCEPCLDSVTFSDVVSATEPCKPCTECVGLQSMSAPCVEADDAVCRCAYGYYQDETTGRCEACRVCEAGSGLVFSCQDKQNTVCEECPDGTYSDEANHVDPCLPCTVCEDTERQLRECTRWADAECEEIPGRWITRSTPPEGSDSTAPSTQEPEAPPEQDLIASTVAGVVTTVMGSSQPVVTRGTTDNPKFWVLVVVGGVLACYSLLVTVAFIIFWVRSKRSRLLHSDYMNMTPRRPGPTRKHYQPYAPPRDFAAYRSRVKFSRSADAPAYQQGQNQLYNELNLGRREEYDVLDKRRGRDPEMGGKPRRKNPQEGLYNELQKDKMAEAYSEIGMKGERRRGKGHDGLYQGLSTATKDTYDALHMQALPPR

SEQ ID NO: 7650 - protein, 598 aa, Artificial Sequence
  source: /note="Description of Artificial Sequence: Synthetic Chimeric Antigen Receptor"
MEAPAQLLFLLLLWLPDTTGEIVLTQSPATLSLSPGERATLSCSASSSINYIYWLQQKPGQAPRILIYLTSNLASGVPARFSGSGSGTDFTLTISSLEPEDFAVYYCLQWSSNPLTFGGGTKVEIKRGGGGSGGGGSEVQLVESGGGLVKPGGSLRLSCAASGFTFSSYDMSWVRQAPGKGLEWVSTISSGGSYTYYLDSIKGRFTISRDNAKNSLYLQMNSLRAEDTAVYYCARQGLDYWGRGTLVTVSSGDPKEACPTGLYTHSGECCKACNLGEGVAQPCGANQTVCEPCLDSVTFSDVVSATEPCKPCTECVGLQSMSAPCVEADDAVCRCAYGYYQDETTGRCEACRVCEAGSGLVFSCQDKQNTVCEECPDGTYSDEANHVDPCLPCTVCEDTERQLRECTRWADAECEEPKFWVLVVVGGVLACYSLLVTVAFIIFWVRSKRSRLLHSDYMNMTPRRPGPTRKHYQPYAPPRDFAAYRSRVKFSRSADAPAYQQGQNQLYNELNLGRREEYDVLDKRRGRDPEMGGKPRRKNPQEGLYNELQKDKMAEAYSEIGMKGERRRGKGHDGLYQGLSTATKDTYDALHMQALPPR

SEQ ID NO: 7651 - protein, 636 aa, Artificial Sequence
  source: /note="Description of Artificial Sequence: Synthetic Chimeric Antigen Receptor"
MEAPAQLLFLLLLWLPDTTGEIVLTQSPATLSLSPGERATLSCSASSSINYIYWLQQKPGQAPRILIYLTSNLASGVPARFSGSGSGTDFTLTISSLEPEDFAVYYCLQWSSNPLTFGGGTKVEIKRGGGGSGGGGSEVQLVESGGGLVKPGGSLRLSCAASGFTFSSYDMSWVRQAPGKGLEWVSTISSGGSYTYYLDSIKGRFTISRDNAKNSLYLQMNSLRAEDTAVYYCARQGLDYWGRGTLVTVSSGDPKEACPTGLYTHSGECCKACNLGEGVAQPCGANQTVCEPCLDSVTFSDVVSATEPCKPCTECVGLQSMSAPCVEADDAVCRCAYGYYQDETTGRCEACRVCEAGSGLVFSCQDKQNTVCEECPDGTYSDEAARAADAECEEIPGRWITRSTPPEGSDSTAPSTQEPEAPPEQDLIASTVAGVVTTVMGSSQPVVTRGTTDNPKFWVLVVVGGVLACYSLLVTVAFIIFWVRSKRSRLLHSDYMNMTPRRPGPTRKHYQPYAPPRDFAAYRSRVKFSRSADAPAYQQGQNQLYNELNLGRREEYDVLDKRRGRDPEMGGKPRRKNPQEGLYNELQKDKMAEAYSEIGMKGERRRGKGHDGLYQGLSTATKDTYDALHMQALPPR

SEQ ID NO: 7652 - protein, 576 aa, Artificial Sequence
  source: /note="Description of Artificial Sequence: Synthetic Chimeric Antigen Receptor"
MEAPAQLLFLLLLWLPDTTGEIVLTQSPATLSLSPGERATLSCSASSSINYIYWLQQKPGQAPRILIYLTSNLASGVPARFSGSGSGTDFTLTISSLEPEDFAVYYCLQWSSNPLTFGGGTKVEIKRGGGGSGGGGSEVQLVESGGGLVKPGGSLRLSCAASGFTFSSYDMSWVRQAPGKGLEWVSTISSGGSYTYYLDSIKGRFTISRDNAKNSLYLQMNSLRAEDTAVYYCARQGLDYWGRGTLVTVSSGDPKEACPTGLYTHSGECCKACNLGEGVAQPCGANQTVCEPCLDSVTFSDVVSATEPCKPCTECVGLQSMSAPCVEADDAVCRCAYGYYQDETTGRCEACRVCEAGSGLVFSCQDKQNTVCEECPDGTYSDEAARAADAECEEPKFWVLVVVGGVLACYSLLVTVAFIIFWVRSKRSRLLHSDYMNMTPRRPGPTRKHYQPYAPPRDFAAYRSRVKFSRSADAPAYQQGQNQLYNELNLGRREEYDVLDKRRGRDPEMGGKPRRKNPQEGLYNELQKDKMAEAYSEIGMKGERRRGKGHDGLYQGLSTATKDTYDALHMQALPPR

SEQ ID NO: 7653 - protein, 576 aa, Artificial Sequence; identical to SEQ ID NO: 7652
  source: /note="Description of Artificial Sequence: Synthetic Chimeric Antigen Receptor"

SEQ ID NO: 7654 - protein, 526 aa, Artificial Sequence
  source: /note="Description of Artificial Sequence: Synthetic Chimeric Antigen Receptor"
MALPVTALLLPLALLLHAARPDIQVTQSPSSLSASLGERISLTCRTSQDISNYLNWFQQKPDGTFKRLIYATSSLDSGVPKRFSGSGSGSDYSLTISSLESEDFADYYCLQYASYPFTFGSGTKLEIKGGGGSGGGGSGGGGSEVQLQESGPGLVKPSQTLSLTCSVTGYSITSGYYWHWIRQFPGNKLQWMGYISYSGFTNYKTSLINRISITHDTSENQFFLNLNSVTTEDTATYYCAGDRTGSWFAYWGQGTLVTVSATTTPAPRPPTPAPTIASQPLSLRPEACRPAAGGAVHTRGLDFACDIYIWAPLAGTCGVLLLSLVITLYCRSKRSRLLHSDYMNMTPRRPGPTRKHYQPYAPPRDFAAYRSKRGRKKLLYIFKQPFMRPVQTTQEEDGCSCRFPEEEEGGCELRVKFSRSADAPAYQQGQNQLYNELNLGRREEYDVLDKRRGRDPEMGGKPQRRKNPQEGLYNELQKDKMAEAYSEIGMKGERRRGKGHDGLYQGLSTATKDTYDALHMQALPPR

SEQ ID NO: 7655 - protein, 686 aa, Artificial Sequence
  source: /note="Description of Artificial Sequence: Synthetic Chimeric Antigen Receptor"
MEFGLSWLFLVAILKGVQCIDAMGNIQLVQSGPELKKPGETVKISCKASGYTFTNYGMNWVKQAPGKGLRWMGWINTHTGEPTYADDFKGRFAFSLETSASTAYLQINNLKNEDTATYFCTRRGYDWYFDVWGAGTTVTVSSGGGGSGGGGSGGGGSDIKMTQSPSSMYASLGERVTITCKASQDINSYLSWFHHKPGKSPKTLIYRANRLVDGVPSRFSGSGSGQDYSLTISSLDYEDMGIYYCQQYDESPWTFGGGTKLEMKGSGDPAEPKSPDKTHTCPPCPAPELLGGPSVFLFPPKPKDTLMISRTPEVTCVVVDVSHEDPEVKFNWYVDGVEVHNAKTKPREEQYNSTYRVVSVLTVLHQDWLNGKEYKCKVSNKALPAPIEKTISKAKGQPREPQVYTLPPSRDELTKNQVSLTCLVKGFYPSDIAVEWESNGQPENNYKTTPPVLDSDGSFFLYSKLTVDKSRWQQGNVFSCSVMHEALHNHYTQKSLSLSPGKKDPKFWVLVVVGGVLACYSLLVTVAFIIFWVRSKRSRLLHSDYMNMTPRRPGPTRKHYQPYAPPRDFAAYRSRVKFSRSADAPAYQQGQNQLYNELNLGRREEYDVLDKRRGRDPEMGGKPRRKNPQEGLYNELQKDKMAEAYSEIGMKGERRRGKGHDGLYQGLSTATKDTYDALHMQALPPR

SEQ ID NO: 7656 - protein, 529 aa, Artificial Sequence
  source: /note="Description of Artificial Sequence: Synthetic Chimeric Antigen Receptor"
MALPVTALLLPLALLLHAARPDIQMTQSPSSLSASVGDRVTITCKASQNIDKYLNWYQQKPGKAPKLLIYNTNNLQTGVPSRFSGSGSGTDFTFTISSLQPEDIATYYCLQHISRPRTFGQGTKVEIKGGGGSGGGGSGGGGSQVQLQESGPGLVRPSQTLSLTCTVSGFTFTDFYMNWVRQPPGRGLEWIGFIRDKAKGYTTEYNPSVKGRVTMLVDTSKNQFSLRLSSVTAADTAVYYCAREGHTAAPFDYWGQGSLVTVSSTTTPAPRPPTPAPTIASQPLSLRPEACRPAAGGAVHTRGLDFACDIYIWAPLAGTCGVLLLSLVITLYCRSKRSRLLHSDYMNMTPRRPGPTRKHYQPYAPPRDFAAYRSKRGRKKLLYIFKQPFMRPVQTTQEEDGCSCRFPEEEEGGCELRVKFSRSADAPAYQQGQNQLYNELNLGRREEYDVLDKRRGRDPEMGGKPQRRKNPQEGLYNELQKDKMAEAYSEIGMKGERRRGKGHDGLYQGLSTATKDTYDALHMQALPPR

SEQ ID NO: 7657 - protein, 540 aa, Artificial Sequence
  source: /note="Description of Artificial Sequence: Synthetic Chimeric Antigen Receptor"
MALPVTALLLPLALLLHAARPGAQPAMAAYKDIQMTQTTSSLSASLGDRVTISCSASQGISNYLNWYQQKPDGTNKLLIYYTSSLHSGVPSRFSGSGSGTDYSLHSNLEPEDIATYYCQQYSKLPYTFGGGTKLEIKRGGGGSGGGGSGGGGSGGGGSEVQLVESGGGLVKPGGSLKLSCAASGLTFSSYAMSWNRQTPEKRLEWVASISSGGFTYYPDSNKGRFTISRDNARNILYLQMSSLRSEDTAMYYCARDEVRGYLDVWGAGTTVTVSSTTTPAPRPPTPAPTIASQPLSLRPEACRPAAGGAVHTRGLDFACDIYIWAPLAGTCGVLLLSLVITLYCRSKRSRLLHSDYMNMTPRRPGPTRKHYQPYAPPRDFAAYRSKRGRKKLLYIFKQPFMRPVQTTQEEDGCSCRFPEEEEGGCELRVKFSRSADAPAYQQGQNQLYNELNLGRREEYDVLDKRRGRDPEMGGKPQRRKNPQEGLYNELQKDKMAEAYSEIGMKGERRRGKGHDGLYQGLSTATKDTYDALHMQALPPR

SEQ ID NO: 7658 - protein, 244 aa, Artificial Sequence
  source: /note="Description of Artificial Sequence: Synthetic Chimeric Antigen Receptor"
GVHSQVQLQESGPGLVRPSQTLSLTCTVSGFTISSGYSWHWVRQPPGRGLEWIGYIQYSGITNYNPSLKSRVTMLVDTSKNQFSLRLSSVTAADTAVYYCAREDYDYHWYFDVWGQGTTVTVSSGGGGSGGGGSGGGGSDIQLTQSPSSLSASVGDRVTITCSTSSSVSYMHWYQQKPGKAPKLLIYSTSNLASGVPSRFSGSGSGTDFTFTISSLQPEDIATYYCHQWSSYPTFGQGTKVEIK

SEQ ID NO: 7659 - protein, 464 aa, Artificial Sequence
  source: /note="Description of Artificial Sequence: Synthetic Chimeric Antigen Receptor"
MALPVTALLLPLALLLHAARPQVQLVESGGGVVQPGRSLRLSCAASGFTFSNYGIHWVRQAPGKGLEWVAVIWYDGSNKYYADSVKGRFTISRDNSKNTLYLQMNSLRAEDTAVYYCARDGGYSGYDSGFDYWGQGTLVTVSSGGGGSGGGGSGGGGSDIVMTQSPLSLPVTPGEPASISCRSSQSLLNSNGYNYLDWYLQKPGQSPQFLIYLGSYRASGVPDRFSGSGSGTDFTLRISRVEAEDVGVYYCIQTLQTPFTFGPGTKVDIKGLAVSTISSFFPPGYQIYIWAPLAGTCGVLLLSLVITLYCKRGRKKLLYIFKQPFMRPVQTTQEEDGCSCRFPEEEEGGCELRVKFSRSADAPAYQQGQNQLYNELNLGRREEYDVLDKRRGRDPEMGGKPRRKNPQEGLYNELQKDKMAEAYSEIGMKGERRRGKGHDGLYQGLSTATKDTYDALHMQALPPR

SEQ ID NO: 7660 - protein, 493 aa, Artificial Sequence
  source: /note="Description of Artificial Sequence: Synthetic Chimeric Antigen Receptor"
MALPVTALLLPLALLLHAARPQVQLVESGGGVVQPGRSLRLSCAASGFTFSNYGIHWVRQAPGKGLEWVAVIWYDGSNKYYADSVKGRFTISRDNSKNTLYLQMNSLRAEDTAVYYCARDGGYSGYDSGFDYWGQGTLVTVSSGGGGSGGGGSGGGGSDIVMTQSPLSLPVTPGEPASISCRSSQSLLNSNGYNYLDWYLQKPGQSPQFLIYLGSYRASGVPDRFSGSGSGTDFTLRISRVEAEDVGVYYCIQTLQTPFTFGPGTKVDIKTTTPAPRPPTPAPTIASQPLSLRPEACRPAAGGAVHTRGLDFACDIYIWAPLAGTCGVLLLSLVITLYCKRGRKKLLYIFKQPFMRPVQTTQEEDGCSCRFPEEEEGGCELRVKFSRSADAPAYQQGQNQLYNELNLGRREEYDVLDKRRGRDPEMGGKPRRKNPQEGLYNELQKDKMAEAYSEIGMKGERRRGKGHDGLYQGLSTATKDTYDALHMQALPPR

SEQ ID NO: 7661 - protein, 459 aa, Artificial Sequence
  source: /note="Description of Artificial Sequence: Synthetic Chimeric Antigen Receptor"
MALPVTALLLPLALLLHAARPQVQLVESGGGVVQPGRSLRLSCAASGFTFSSYGMHWVRQAPGKGLEWVAVIWYDGSDKYFADSVKGRFTISRDNSKNTLYLQMNSLRAEDTAVYYCARDGIAGARYVYFDYWGQGTLVTVSSGGGGSGGGGSGGGGSDIQMTQSPSSLSASVGDRVTITCRASQGISNYLAWFQQKPGKAPKSLIYAASSLQGGVPSKFSGSGSGTDFTLTISSLQPEDFATYYCQQYYNYPFTFGPGTTVDIKGLAVSTISSFFPPGYQIYIWAPLAGTCGVLLLSLVITLYCKRGRKKLLYIFKQPFMRPVQTTQEEDGCSCRFPEEEEGGCELRVKFSRSADAPAYQQGQNQLYNELNLGRREEYDVLDKRRGRDPEMGGKPRRKNPQEGLYNELQKDKMAEAYSEIGMKGERRRGKGHDGLYQGLSTATKDTYDALHMQALPPR

SEQ ID NO: 7662 - protein, 455 aa, Artificial Sequence
  source: /note="Description of Artificial Sequence: Synthetic Chimeric Antigen Receptor"
MALPVTALLLPLALLLHAARPQVQLQESGPGLVKPSETLSLTCVVSGGSISSSNWWSWVRQPPGKGLEWIGEIYHSGSPNYNPSLKSRVTISVDKSKNQFSLKLSSVTAADTAVYYCARSSSGGFFDYWGQGTLVTVSSGGGGSGGGGSGGGGSDIQMTQSPSSLSASVGDRVTITCRASQSISSYLNWYQQKPGKAPKLLIYAASSLQSGVPSRFSGSGSGTDFTLTISSLQPEDFATYYCQQSYSTPPTFGQGTKVEIKGLAVSTISSFFPPGYQIYIWAPLAGTCGVLLLSLVITLYCKRGRKKLLYIFKQPFMRPVQTTQEEDGCSCRFPEEEEGGCELRVKFSRSADAPAYQQGQNQLYNELNLGRREEYDVLDKRRGRDPEMGGKPRRKNPQEGLYNELQKDKMAEAYSEIGMKGERRRGKGHDGLYQGLSTATKDTYDALHMQALPPR

SEQ ID NO: 7663 - protein, 584 aa, Artificial Sequence
  source: /note="Description of Artificial Sequence: Synthetic Chimeric Antigen Receptor"
MALPVTALLLPLALLLHAARPQVQLVESGGGVVQPGRSLRLSCAASGFTFSNYGIHWVRQAPGKGLEWVAVIWYDGSNKYYADSVKGRFTISRDNSKNTLYLQMNSLRAEDTAVYYCARDGGYSGYDSGFDYWGQGTLVTVSSGGGGSGGGGSGGGGSDIVMTQSPLSLPVTPGEPASISCRSSQSLLNSNGYNYLDWYLQKPGQSPQFLIYLGSYRASGVPDRFSGSGSGTDFTLRISRVEAEDVGVYYCIQTLQTPFTFGPGTKVDIKEPKSPDKTHTCPPCPAPPVAGPSVFLFPPKPKDTLMIARTPEVTCVVVDVSHEDPEVKFNWYVDGVEVHNAKTKPREEQYNSTYRVVSVLTVLHQDWLNGKEYKCKVSNKALPAPIEKTISKAKGQPREPQVYTLPPSRDELTKNQVSLTCLVKGFYPSDIAVEWESNGQPENNYKTTPPVLDSDGSFFLYSKLTVDKSRWQQGNVFSCSVMHEALHNHYTQKSLSLSPGKIYIWAPLAGTCGVLLLSLVITLYCKRGRKKLLYIFKQPFMRPVQTTQEEDGCSCRFPEEEEGGCELRVKFSRSADAPAYQQGQ

SEQ ID NO: 7664 - protein, 488 aa, Artificial Sequence
  source: /note="Description of Artificial Sequence: Synthetic Chimeric Antigen Receptor"
MALPVTALLLPLALLLHAARPQVQLVESGGGVVQPGRSLRLSCAASGFTFSSYGMHWVRQAPGKGLEWVAVIWYDGSDKYFADSVKGRFTISRDNSKNTLYLQMNSLRAEDTAVYYCARDGIAGARYVYFDYWGQGTLVTVSSGGGGSGGGGSGGGGSDIQMTQSPSSLSASVGDRVTITCRASQGISNYLAWFQQKPGKAPKSLIYAASSLQGGVPSKFSGSGSGTDFTLTISSLQPEDFATYYCQQYYNYPFTFGPGTTVDIKTTTPAPRPPTPAPTIASQPLSLRPEACRPAAGGAVHTRGLDFACDIYIWAPLAGTCGVLLLSLVITLYCKRGRKKLLYIFKQPFMRPVQTTQEEDGCSCRFPEEEEGGCELRVKFSRSADAPAYQQGQNQLYNELNLGRREEYDVLDKRRGRDPEMGGKPRRKNPQEGLYNELQKDKMAEAYSEIGMKGERRRGKGHDGLYQGLSTATKDTYDALHMQALPPR

SEQ ID NO: 7665 - protein, 674 aa, Artificial Sequence
  source: /note="Description of Artificial Sequence: Synthetic Chimeric Antigen Receptor"
MALPVTALLLPLALLLHAARPQVQLVESGGGVVQPGRSLRLSCAASGFTFSSYGMHWVRQAPGKGLEWVAVIWYDGSDKYFADSVKGRFTISRDNSKNTLYLQMNSLRAEDTAVYYCARDGIAGARYVYFDYWGQGTLVTVSSGGGGSGGGGSGGGGSDIQMTQSPSSLSASVGDRVTITCRASQGISNYLAWFQQKPGKAPKSLIYAASSLQGGVPSKFSGSGSGTDFTLTISSLQPEDFATYYCQQYYNYPFTFGPGTTVDIKEPKSPDKTHTCPPCPAPPVAGPSVFLFPPKPKDTLMIARTPEVTCVVVDVSHEDPEVKFNWYVDGVEVHNAKTKPREEQYNSTYRVVSVLTVLHQDWLNGKEYKCKVSNKALPAPIEKTISKAKGQPREPQVYTLPPSRDELTKNQVSLTCLVKGFYPSDIAVEWESNGQPENNYKTTPPVLDSDGSFFLYSKLTVDKSRWQQGNVFSCSVMHEALHNHYTQKSLSLSPGKIYIWAPLAGTCGVLLLSLVITLYCKRGRKKLLYIFKQPFMRPVQTTQEEDGCSCRFPEEEEGGCELRVKFSRSADAPAYQQGQNQLYNELNLGRREEYDVLDKRRGRDPEMGGKPRRKNPQEGLYNELQKDKMAEAYSEIGMKGERRRGKGHDGLYQGLSTATKDTYDALHMQALPPR

SEQ ID NO: 7666 - protein, 741 aa, Artificial Sequence
  source: /note="Description of Artificial Sequence: Synthetic Chimeric Antigen Receptor"
AQLEKELQALEKENAQLEWELQALEKELAQSGGGGSADAPAYQQGQNQLYNELNLGRREEYDVLDKRRGRDPEMGGKPRRKNPQEGLYNELQKDKMAEAYSEIGMKGERRRGKGHDGLYQGLSTATKDTYDALHMQALPPRRAEGRGSLLTCGDVEENPGPMAVPTQVLGLLLLWLTDARCDIQMTQSPSSLSASVGDRVTITCRASEDIYFNLVWYQQKPGKAPKLLIYDTNRLADGVPSRFSGSGSGTQYTLTISSLQPEDFATYYCQHYKNYPLTFGQGTKLEIKRSGGGGSGGGGSGGGGSRSEVQLVESGGGLVQPGGSLRLSCAASGFTLSNYGMHWIRQAPGKGLEWVSSISLNGGSTYYRDSVKGRFTISRDNAKSTLYLQMNSLRAEDTAVYYCAAQDAYTGGYFDYWGQGTLVTVSSMPCPAPPVAGPSVFLFPPKPKDTLMIARTPEVTCVVVDVSHEDPEVKFNWYVDGVEVHNAKTKPREEQYNSTYRVVSVLTVLHQDWLNGKEYKCKVSNKALPAPIEKTISKAKPCPAPPVAGPSVFLFPPKPKDTLMIARTPEVTCVVVDVSHEDPEVKFNWYVDGVEVHNAKTKPREEQYNSTYRVVSVLTVLHQDWLNGKEYKCKVSNKALPAPIEKTISKAKMALIVLGGVAGLLLFIGLGIFFMALIVLGGVAGLLLFIGLGIFFCVRCRHRRRSGGGGSAQLEKKLQALKKKNAQLKWKLQALKKKLAQ

SEQ ID NO: 7667 - protein, 719 aa, Artificial Sequence
  source: /note="Description of Artificial Sequence: Synthetic Chimeric Antigen Receptor"
MAPAMESPTLLCVALLFFAPDGVLAMNIFLLSVLLALLPNVFTARVDQTPRTATKETGESLTINCVLRDTSCAFSSTGWYRTKLGSTNEQSISIGGRYVETVNKGSKSFSLRISDLRVEDSGTYKCQAYVIATMAPLCYASYSWNEKGAGTVLTVKPGVQPSPPVISLLYSATEEQRGNGFVQLICLISGYYFFIPLLVVILFAVDTGLFISTQQQVTFLLKIKRTRKGFRLLNPHPKPNPKNNRAEGRGSLLTCGDVEENPGPMDTESNRRANLALPQEPSSVPAFEVLEISPQEVSSGRLLKSASSPPLHTWLTVLKKEQEFLGVTQILTAMICLCFGTVVCSVLDISHIEGDIFSSFKAGYPFWGAIFFSISGMLSIISERRNATYLVRGSLGANTASSIAGGTGITILIINLKKSLAYIHIHSCQKFFETKCFMASFSTEIVVMMLFLTILGLGSAVSLTICGAGEELKGNKVPEKRGRKKLLYIFKQPFMRPVQTTQEEDGCSCRFPEEEEGGCELGSGVKQTLNFDLLKLAGDVESNPGPMIPAVVLLLLLLVEQAAALGEPQLCYILDAILFLYGIVLTLLYCRLKIQVRKAAITSYEKSRVKFSRSADAPAYQQGQNQLYNELNLGRREEYDVLDKRRGRDPEMGGKPRRKNPQEGLYNELQKDKMAEAYSEIGMKGERRRGKGHDGLYQGLSTATKDTYDALHMQALPPR

SEQ ID NO: 7668 - protein, 513 aa, Artificial Sequence
  source: /note="Description of Artificial Sequence: Synthetic Chimeric Antigen Receptor"
MSVPTQVLGLLLLWLTGARCDIQMTQSPASLSASVGDTVTITCRASENIYSYLAWYQQKQGKSPQLLVYNAKALSEGVPSRFSGSGSGTQFSLRINSLQPEDFGDYYCQHHYNSPYTFGGGTKLEIKGSTSGSGKSSEGKGQIQLVQSGPELKKPGETVKISCKASGYSFTNDGINWVKQAPGKGFKYMGWINTITGEPTYTEDFKGRFAFSLETSASTAYLQINNLKDEDTATFFCAKGTGTSAYWGQGTLVTVSATSLSNSIMYFSHFVPVFLPAKPTTTPAPRPPTPAPTIASQPLSLRPEACRPAAGGAVHTRGLDSRFWVLVVVGGVLACYSLLVTVAFIIFWVRLRVKFSRSADAPAYQQGQNQLYNELNLGRREEYDVLDKRRGRDPEMGGKPQRRKNPQEGLYNELQKDKMAEAYSEIGMKGERRRGKGHDGLYQGLSTATKDTYDALHMQALPPRRSQCMWPRETQLLLEVPPSTEDARSCQFPEEERGERSAEEKGRLGDLWV

SEQ ID NO: 7669 - protein, 553 aa, Artificial Sequence
  source: /note="Description of Artificial Sequence: Synthetic Chimeric Antigen Receptor"
MSVPTQVLGLLLLWLTGARCDIQMTQSPASLSASVGDTVTITCRASENIYSYLAWYQQKQGKSPQLLVYNAKALSEGVPSRFSGSGSGTQFSLRINSLQPEDFGDYYCQHHYNSPYTFGGGTKLEIKGSTSGSGKSSEGKGQIQLVQSGPELKKPGETVKISCKASGYSFTNDGINWVKQAPGKGFKYMGWINTITGEPTYTEDFKGRFAFSLETSASTAYLQINNLKDEDTATFFCAKGTGTSAYWGQGTLVTVSATSLSNSIMYFSHFVPVFLPAKPTTTPAPRPPTPAPTIASQPLSLRPEACRPAAGGAVHTRGLDSRFWVLVVVGGVLACYSLLVTVAFIIFWVRLRVKFSRSADAPAYQQGQNQLYNELNLGRREEYDVLDKRRGRDPEMGGKPQRRKNPQEGLYNELQKDKMAEAYSEIGMKGERRRGKGHDGLYQGLSTATKDTYDALHMQALPPRRSQCMWPRETQLLLEVPPSTEDARSCQFPEEERGERSAEEKGRLGDLWVSKRSRLLHSDYMNMTPRRPGPTRKHYQPYAPPRDFAAYRS

SEQ ID NO: 7670 - protein, 793 aa, Artificial Sequence
  source: /note="Description of Artificial Sequence: Synthetic Chimeric Antigen Receptor"
MVSKGEELFTGVVPILVELDGDVNGHKFSVSGEGEGDATYGKLTLKFICTTGKLPVPWPTLVTTLTYGVQCFSRYPDHMKQHDFFKSAMPEGYVQERTIFFKDDGNYKTRAEVKFEGDTLVNRIELKGIDFKEDGNILGHKLEYNYNSHNVYIMADKQKNGIKVNFKIRHNIEDGSVQLADHYQQNTPIGDGPVLLPDNHYLSTQSALSKDPNEKRDHMVLLEFVTAAGITLGMDELYKSGVKQTLNFDLLKLAGDVESNPGPMALPVTALLLPLALLLHAARPDIQMTQSPASLSASVGETVTITCRASENIDSYLAWYQQKQGKSPQLLVYASTLLVDGVPSRFSGSRSGTQFSLKINSLQSEDVARYYCQHYYSIPYTFGSGTKLEIKGGGGSGGGGSGGGGSEVKLVESGGGLVKPGGSLKLSCAASGFTFNSYTMSWVRQTPAKRLEWVVTISSGGGRTYYPDSVKGRFTISRDNARNTLYLQMSSLRSEDTAMYYCIRGDYRYDGFAYWGQGTVVTVSTTTTPAPRPPTPAPTIASQPLSLRPEACRPAAGGAVHTRGLDFACDFWVLVVVGGVLACYSLLVTVAFIIFWVRSKRSRLLHSDYMNMTPRRPGPTRKHYQPYAPPRDFAAYRSKRGRKKLLYIFKQPFMRPVQTTQEEDGCSCRFPEEEEGGCELRVKFSRSADAPAYQQGQNQLYNELNLGRREEYDVLDKRRGRDPEMGGKPQRRKNPQEGLYNELQKDKMAEAYSEIGMKGERRRGKGHDGLYQGLSTATKDTYDALHMQALPPR

SEQ ID NO: 7671 - protein, 918 aa, Artificial Sequence
  source: /note="Description of Artificial Sequence: Synthetic Chimeric Antigen Receptor"
MAPAMESPTLLCVALLFFAPDGVLAMNIFLLSVLLALLPNVFTARVDQTPRTATKETGESLTINCVLRDTSCAFSSTGWYRTKLGSTNEQSISIGGRYVETVNKGSKSFSLRISDLRVEDSGTYKCQAYVIATMAPLCYASYSWNEKGAGTVLTVKEPKSPDKTHTCPPCPAPPVAGPSVFLFPPKPKDTLMIARTPEVTCVVVDVSHEDPEVKFNWYVDGVEVHNAKTKPREEQYNSTYRVVSVLTVLHQDWLNGKEYKCKVSNKALPAPIEKTISKAKGQPREPQVYTLPPSRDELTKNQVSLTCLVKGFYPSDIAVEWESNGQPENNYKTTPPVLDSDGSFFLYSKLTVDKSRWQQGNVFSCSVMHEALHNHYTQKSLSLSPGKKDPKFFIPLLVVILFAVDTGLFISTQQQVTFLLKIKRTRKGFRLLNPHPKPNPKNNRAEGRGSLLTCGDVEENPGPMDTESNRRANLALPQEPSSVPAFEVLEISPQEVSSGRLLKSASSPPLHTWLTVLKKEQEFLGVTQILTAMICLCFGTVVCSVLDISHIEGDIFSSFKAGYPFWGAIFFSISGMLSIISERRNATYLVRGSLGANTASSIAGGTGITILIINLKKSLAYIHIHSCQKFFETKCFMASFSTEIVVMMLFLTILGLGSAVSLTICGAGEELKGNKVPEKRGRKKLLYIFKQPFMRPVQTTQEEDGCSCRFPEEEEGGCELGSGVKQTLNFDLLKLAGDVESNPGPMIPAVVLLLLLLVEQAAALGEPQLCYILDAILFLYGIVLTLLYCRLKIQVRKAAITSYEKSRVKFSRSADAPAYQQGQNQLYNELNLGRREEYDVLDKRRGRDPEMGGKPRRKNPQEGLYNELQKDKMAEAYSEIGMKGERRRGKGHDGLYQGLSTATKDTYDALHMQALPPR

SEQ ID NO: 7672 - protein, 728 aa, Artificial Sequence
  source: /note="Description of Artificial Sequence: Synthetic Chimeric Antigen Receptor"
MAPAMESPTLLCVALLFFAPDGVLAMNIFLLSVLLALLPNVFTARVDQTPRTATKETGESLTINCVLRDTSCAFSSTGWYRTKLGSTNEQSISIGGRYVETVNKGSKSFSLRISDLRVEDSGTYKCQAYVIATMAPLCYASYSWNEKGAGTVLTVKTTTPAPRPPTPAPTIASQPLSLRPEACRPAAGGAVHTRGLDFACDFFIPLLVVILFAVDTGLFISTQQQVTFLLKIKRTRKGFRLLNPHPKPNPKNNRAEGRGSLLTCGDVEENPGPMDTESNRRANLALPQEPSSVPAFEVLEISPQEVSSGRLLKSASSPPLHTWLTVLKKEQEFLGVTQILTAMICLCFGTVVCSVLDISHIEGDIFSSFKAGYPFWGAIFFSISGMLSIISERRNATYLVRGSLGANTASSIAGGTGITILIINLKKSLAYIHIHSCQKFFETKCFMASFSTEIVVMMLFLTILGLGSAVSLTICGAGEELKGNKVPEKRGRKKLLYIFKQPFMRPVQTTQEEDGCSCRFPEEEEGGCELGSGVKQTLNFDLLKLAGDVESNPGPMIPAVVLLLLLLVEQAAALGEPQLCYILDAILFLYGIVLTLLYCRLKIQVRKAAITSYEKSRVKFSRSADAPAYQQGQNQLYNELNLGRREEYDVLDKRRGRDPEMGGKPRRKNPQEGLYNELQKDKMAEAYSEIGMKGERRRGKGHDGLYQGLSTATKDTYDALHMQALPPR

SEQ ID NO: 7673 - protein, 370 aa, Artificial Sequence
  source: /note="Description of Artificial Sequence: Synthetic Chimeric Antigen Receptor"
MAPAMESPTLLCVALLFFAPDGVLAMNIFLLSVLLALLPNVFTARVDQTPRTATKETGESLTINCVLRDTSCAFSSTGWYRTKLGSTNEQSISIGGRYVETVNKGSKSFSLRISDLRVEDSGTYKCQAYVIATMAPLCYASYSWNEKGAGTVLTVKPGVQPSPPVISLLYSATEEQRGNGFVQLICLISGYYIYIWAPLAGTCGVLLLSLVITLYCKRGRKKLLYIFKQPFMRPVQTTQEEDGCSCRFPEEEEGGCELRVKFSRSADAPAYQQGQNQLYNELNLGRREEYDVLDKRRGRDPEMGGKPRRKNPQEGLYNELQKDKMAEAYSEIGMKGERRRGKGHDGLYQGLSTATKDTYDALHMQALPPR

SEQ ID NO: 7674 - protein, 569 aa, Artificial Sequence
  source: /note="Description of Artificial Sequence: Synthetic Chimeric Antigen Receptor"
MAPAMESPTLLCVALLFFAPDGVLAMNIFLLSVLLALLPNVFTARVDQTPRTATKETGESLTINCVLRDTSCAFSSTGWYRTKLGSTNEQSISIGGRYVETVNKGSKSFSLRISDLRVEDSGTYKCQAYVIATMAPLCYASYSWNEKGAGTVLTVKEPKSPDKTHTCPPCPAPPVAGPSVFLFPPKPKDTLMIARTPEVTCVVVDVSHEDPEVKFNWYVDGVEVHNAKTKPREEQYNSTYRVVSVLTVLHQDWLNGKEYKCKVSNKALPAPIEKTISKAKGQPREPQVYTLPPSRDELTKNQVSLTCLVKGFYPSDIAVEWESNGQPENNYKTTPPVLDSDGSFFLYSKLTVDKSRWQQGNVFSCSVMHEALHNHYTQKSLSLSPGKKDPKIYIWAPLAGTCGVLLLSLVITLYCKRGRKKLLYIFKQPFMRPVQTTQEEDGCSCRFPEEEEGGCELRVKFSRSADAPAYQQGQNQLYNELNLGRREEYDVLDKRRGRDPEMGGKPRRKNPQEGLYNELQKDKMAEAYSEIGMKGERRRGKGHDGLYQGLSTATKDTYDALHMQALPPR

SEQ ID NO: 7675 - protein, 379 aa, Artificial Sequence
  source: /note="Description of Artificial Sequence: Synthetic Chimeric Antigen Receptor"
MAPAMESPTLLCVALLFFAPDGVLAMNIFLLSVLLALLPNVFTARVDQTPRTATKETGESLTINCVLRDTSCAFSSTGWYRTKLGSTNEQSISIGGRYVETVNKGSKSFSLRISDLRVEDSGTYKCQAYVIATMAPLCYASYSWNEKGAGTVLTVKTTTPAPRPPTPAPTIASQPLSLRPEACRPAAGGAVHTRGLDFACDIYIWAPLAGTCGVLLLSLVITLYCKRGRKKLLYIFKQPFMRPVQTTQEEDGCSCRFPEEEEGGCELRVKFSRSADAPAYQQGQNQLYNELNLGRREEYDVLDKRRGRDPEMGGKPRRKNPQEGLYNELQKDKMAEAYSEIGMKGERRRGKGHDGLYQGLSTATKDTYDALHMQALPPR

SEQ ID NO: 7676 - protein, 743 aa, Artificial Sequence
  source: /note="Description of Artificial Sequence: Synthetic Chimeric Antigen Receptor"
VQIEYLAKQIVDNAIQQASGGGGSADAPAYQQGQNQLYNELNLGRREEYDVLDKRRGRDPEMGGKPRRKNPQEGLYNELQKDKMAEAYSEIGMKGERRRGKGHDGLYQGLSTATKDTYDALHMQALPPRRAEGRGSLLTCGDVEENPGPMAVPTQVLGLLLLWLTDARCDIQMTQSPSSLSASVGDRVTITCRASEDIYFNLVWYQQKPGKAPKLLIYDTNRLADGVPSRFSGSGSGTQYTLTISSLQPEDFATYYCQHYKNYPLTFGQGTKLEIKRSGGGGSGGGGSGGGGSRSEVQLVESGGGLVQPGGSLRLSCAASGFTLSNYGMHWIRQAPGKGLEWVSSISLNGGSTYYRDSVKGRFTISRDNAKSTLYLQMNSLRAEDTAVYYCAAQDAYTGGYFDYWGQGTLVTVSSMPCPAPPVAGPSVFLFPPKPKDTLMIARTPEVTCVVVDVSHEDPEVKFNWYVDGVEVHNAKTKPREEQYNSTYRVVSVLTVLHQDWLNGKEYKCKVSNKALPAPIEKTISKAKPCPAPPVAGPSVFLFPPKPKDTLMIARTPEVTCVVVDVSHEDPEVKFNWYVDGVEVHNAKTKPREEQYNSTYRVVSVLTVLHQDWLNGKEYKCKVSNKALPAPIEKTISKAKMALIVLGGVAGLLLFIGLGIFFMALIVLGGVAGLLLFIGLGIFFCVRCRHRRRSGGGGSSHIQIPPGLTELLQGYTVEVLRQQPPDLVEFAVEYFTRLREARA

SEQ ID NO: 7677 - protein, 704 aa, Artificial Sequence
  source: /note="Description of Artificial Sequence: Synthetic Chimeric Antigen Receptor"
MVSKGEELFTGVVPILVELDGDVNGHKFSVSGEGEGDATYGKLTLKFICTTGKLPVPWPTLVTTLTYGVQCFSRYPDHMKQHDFFKSAMPEGYVQERTIFFKDDGNYKTRAEVKFEGDTLVNRIELKGIDFKEDGNILGHKLEYNYNSHNVYIMADKQKNGIKVNFKIRHNIEDGSVQLADHYQQNTPIGDGPVLLPDNHYLSTQSALSKDPNEKRDHMVLLEFVTAAGITLGMDELYKSGVKQTLNFDLLKLAGDVESNPGPMALPVTALLLPLALLLHAARPEVKLVESGGGLVKPGGSLKLSCAASGFTFNSYTMSWVRQTPAKRLEWVVTISSGGGRTYYPDSVKGRFTISRDNARNTLYLQMSSLRSEDTAMYYCIRGDYRYDGFAYWGQGTVVTVSTGGGGSGGGGSGGGGSDIQMTQSPASLSASVGETVTITCRASENIDSYLAWYQQKQGKSPQLLVYASTLLVDGVPSRFSGSRSGTQFSLKINSLQSEDVARYYCQHYYSIPYTFGSGTKLEIKTTTPAPRPPTPAPTIASQPLSLRPEACRPAAGGAVHTRGLDFACDIYIWAPLAGTCGVLLLSLVITRVKFSRSADAPAYQQGQNQLYNELNLGRREEYDVLDKRRGRDPEMGGKPQRRKNPQEGLYNELQKDKMAEAYSEIGMKGERRRGKGHDGLYQGLSTATKDTYDALHMQALPPR

SEQ ID NO: 7678 - protein, 793 aa, Artificial Sequence
  source: /note="Description of Artificial Sequence: Synthetic Chimeric Antigen Receptor"
MVSKGEELFTGVVPILVELDGDVNGHKFSVSGEGEGDATYGKLTLKFICTTGKLPVPWPTLVTTLTYGVQCFSRYPDHMKQHDFFKSAMPEGYVQERTIFFKDDGNYKTRAEVKFEGDTLVNRIELKGIDFKEDGNILGHKLEYNYNSHNVYIMADKQKNGIKVNFKIRHNIEDGSVQLADHYQQNTPIGDGPVLLPDNHYLSTQSALSKDPNEKRDHMVLLEFVTAAGITLGMDELYKSGVKQTLNFDLLKLAGDVESNPGPMALPVTALLLPLALLLHAARPEVKLVESGGGLVKPGGSLKLSCAASGFTFNSYTMSWVRQTPAKRLEWVVTISSGGGRTYYPDSVKGRFTISRDNARNTLYLQMSSLRSEDTAMYYCIRGDYRYDGFAYWGQGTVVTVSTGGGGSGGGGSGGGGSDIQMTQSPASLSASVGETVTITCRASENIDSYLAWYQQKQGKSPQLLVYASTLLVDGVPSRFSGSRSGTQFSLKINSLQSEDVARYYCQHYYSIPYTFGSGTKLEIKTTTPAPRPPTPAPTIASQPLSLRPEACRPAAGGAVHTRGLDFACDFWVLVVVGGVLACYSLLVTVAFIIFWVRSKRSRLLHSDYMNMTPRRPGPTRKHYQPYAPPRDFAAYRSKRGRKKLLYIFKQPFMRPVQTTQEEDGCSCRFPEEEEGGCELRVKFSRSADAPAYQQGQNQLYNELNLGRREEYDVLDKRRGRDPEMGGKPQRRKNPQEGLYNELQKDKMAEAYSEIGMKGERRRGKGHDGLYQGLSTATKDTYDALHMQALPPR

SEQ ID NO: 7679 - protein, 493 aa, Artificial Sequence
  source: /note="Description of Artificial Sequence: Synthetic Chimeric Antigen Receptor"
MALPVTALLLPLALLLHAARPEVQLVQSGAEVKKPGASVKMSCKASGYTFTSYFIHWVRQAPGQGLEWIGFINPYNDGSKYAQKFQGRATLTSDKSTSTVYMELSSLRSEDTAVYYCTRDDGYYGYAMDYWGQGTLVTVSSASGGGGSGGGGSGGGGSDIQMTQSPSSLSASVGDRVTLTCRATQELSGYLSWLQQKPGKAIKRLIYAASTLDSGVPSRFSGNRAGTDYTLTISSLQPEDFATYYCLQYAIYPYTFGQGTKLEIKRTRTTTPAPRPPTPAPTIASQPLSLRPEACRPAAGGAVHTRGLDFACDIYIWAPLAGTCGVLLLSLVITLYCKRGRKKLLYIFKQPFMRPVQTTQEEDGCSCRFPEEEEGGCELSARVKFSRSADAPAYKQGQNQLYNELNLGRREEYDVLDKRRGRDPEMGGKPRRKNPQEGLYNELQKDKMAEAYSEIGMKGERRRGKGHDGLYQGLSTATKDTYDALHMQALPPR

SEQ ID NO: 7680 - protein, 453 aa, Artificial Sequence
  source: /note="Description of Artificial Sequence: Synthetic Chimeric Antigen Receptor"
MALPVTALLLPLALLLHAARPEVQLLESGGGLVQPGGSLRLSCAASGFTFSSYAMNWVRQAPGKGLEWVSAISDSGGSRWYADSVKGRFTISRDNSKNTLYLQMNSLRAEDTAVYYCTRYWPMDIWGQGTLVTVSSGGGGSGGGGSGGGGSEIVLTQSPGTLSLSPGERATLSCRASVRVSSTYLAWYQQKPGQAPRLLMYDASIRATGIPDRFSGSGSGTDFTLTISRLEPEDFAVYYCQQYMKWPLTFGQGTKVEIKGLAVSTISSFFPPGYQIYIWAPLAGTCGVLLLSLVITLYCKRGRKKLLYIFKQPFMRPVQTTQEEDGCSCRFPEEEEGGCELRVKFSRSADAPAYQQGQNQLYNELNLGRREEYDVLDKRRGRDPEMGGKPRRKNPQEGLYNELQKDKMAEAYSEIGMKGERRRGKGHDGLYQGLSTATKDTYDALHMQALPPR

SEQ ID NO: 7681 - protein, 458 aa, Artificial Sequence
  source: /note="Description of Artificial Sequence: Synthetic Chimeric Antigen Receptor"
MALPVTALLLPLALLLHAARPQVQLQESGPGLVKPSETLSLTCVVSGGSISSSNWWSWVRQPPGKGLEWIGEIYHSGSPNYNPSLKSRVTISVDKSKNQFSLKLSSVTAADTAVYYCARSSSGGFFDYWGQGTLVTVSSGGGGSGGGGSGGGGSDIQMTQSPSSLSASVGDRVTITCRASQSISSYLNWYQQKPGKAPKLLIYAASSLQSGVPSRFSGSGSGTDFTLTISSLQPEDFATYYCQQSYSTPPTFGQGTKVEIKGLAVSTISSFFPPGYQIISFFLALTSTALLFLLFFLTLRFSVVKRGRKKLLYIFKQPFMRPVQTTQEEDGCSCRFPEEEEGGCELRVKFSRSADAPAYQQGQNQLYNELNLGRREEYDVLDKRRGRDPEMGGKPRRKNPQEGLYNELQKDKMAEAYSEIGMKGERRRGKGHDGLYQGLSTATKDTYDALHMQALPPR

SEQ ID NO: 7682 - protein, 484 aa, Artificial Sequence
  source: /note="Description of Artificial Sequence: Synthetic Chimeric Antigen Receptor"
MALPVTALLLPLALLLHAARPQVQLQESGPGLVKPSETLSLTCVVSGGSISSSNWWSWVRQPPGKGLEWIGEIYHSGSPNYNPSLKSRVTISVDKSKNQFSLKLSSVTAADTAVYYCARSSSGGFFDYWGQGTLVTVSSGGGGSGGGGSGGGGSDIQMTQSPSSLSASVGDRVTITCRASQSISSYLNWYQQKPGKAPKLLIYAASSLQSGVPSRFSGSGSGTDFTLTISSLQPEDFATYYCQQSYSTPPTFGQGTKVEIKTTTPAPRPPTPAPTIASQPLSLRPEACRPAAGGAVHTRGLDFACDIYIWAPLAGTCGVLLLSLVITLYCKRGRKKLLYIFKQPFMRPVQTTQEEDGCSCRFPEEEEGGCELRVKFSRSADAPAYQQGQNQLYNELNLGRREEYDVLDKRRGRDPEMGGKPRRKNPQEGLYNELQKDKMAEAYSEIGMKGERRRGKGHDGLYQGLSTATKDTYDALHMQALPPR

SEQ ID NO: 7683 - protein, 487 aa, Artificial Sequence
  source: /note="Description of Artificial Sequence: Synthetic Chimeric Antigen Receptor"
MALPVTALLLPLALLLHAARPQVQLQESGPGLVKPSETLSLTCVVSGGSISSSNWWSWVRQPPGKGLEWIGEIYHSGSPNYNPSLKSRVTISVDKSKNQFSLKLSSVTAADTAVYYCARSSSGGFFDYWGQGTLVTVSSGGGGSGGGGSGGGGSDIQMTQSPSSLSASVGDRVTITCRASQSISSYLNWYQQKPGKAPKLLIYAASSLQSGVPSRFSGSGSGTDFTLTISSLQPEDFATYYCQQSYSTPPTFGQGTKVEIKTTTPAPRPPTPAPTIASQPLSLRPEACRPAAGGAVHTRGLDFACDIISFFLALTSTALLFLLFFLTLRFSVVKRGRKKLLYIFKQPFMRPVQTTQEEDGCSCRFPEEEEGGCELRVKFSRSADAPAYQQGQNQLYNELNLGRREEYDVLDKRRGRDPEMGGKPRRKNPQEGLYNELQKDKMAEAYSEIGMKGERRRGKGHDGLYQGLSTATKDTYDALHMQALPPR

SEQ ID NO: 7684 - protein, 670 aa, Artificial Sequence
  source: /note="Description of Artificial Sequence: Synthetic Chimeric Antigen Receptor"
MALPVTALLLPLALLLHAARPQVQLQESGPGLVKPSETLSLTCVVSGGSISSSNWWSWVRQPPGKGLEWIGEIYHSGSPNYNPSLKSRVTISVDKSKNQFSLKLSSVTAADTAVYYCARSSSGGFFDYWGQGTLVTVSSGGGGSGGGGSGGGGSDIQMTQSPSSLSASVGDRVTITCRASQSISSYLNWYQQKPGKAPKLLIYAASSLQSGVPSRFSGSGSGTDFTLTISSLQPEDFATYYCQQSYSTPPTFGQGTKVEIKEPKSPDKTHTCPPCPAPPVAGPSVFLFPPKPKDTLMIARTPEVTCVVVDVSHEDPEVKFNWYVDGVEVHNAKTKPREEQYNSTYRVVSVLTVLHQDWLNGKEYKCKVSNKALPAPIEKTISKAKGQPREPQVYTLPPSRDELTKNQVSLTCLVKGFYPSDIAVEWESNGQPENNYKTTPPVLDSDGSFFLYSKLTVDKSRWQQGNVFSCSVMHEALHNHYTQKSLSLSPGKIYIWAPLAGTCGVLLLSLVITLYCKRGRKKLLYIFKQPFMRPVQTTQEEDGCSCRFPEEEEGGCELRVKFSRSADAPAYQQGQNQLYNELNLGRREEYDVLDKRRGRDPEMGGKPRRKNPQEGLYNELQKDKMAEAYSEIGMKGERRRGKGHDGLYQGLSTATKDTYDALHMQALPPR

SEQ ID NO: 7685 - protein, 673 aa, Artificial Sequence
  source: /note="Description of Artificial Sequence: Synthetic Chimeric Antigen Receptor"
MALPVTALLLPLALLLHAARPQVQLQESGPGLVKPSETLSLTCVVSGGSISSSNWWSWVRQPPGKGLEWIGEIYHSGSPNYNPSLKSRVTISVDKSKNQFSLKLSSVTAADTAVYYCARSSSGGFFDYWGQGTLVTVSSGGGGSGGGGSGGGGSDIQMTQSPSSLSASVGDRVTITCRASQSISSYLNWYQQKPGKAPKLLIYAASSLQSGVPSRFSGSGSGTDFTLTISSLQPEDFATYYCQQSYSTPPTFGQGTKVEIKEPKSPDKTHTCPPCPAPPVAGPSVFLFPPKPKDTLMIARTPEVTCVVVDVSHEDPEVKFNWYVDGVEVHNAKTKPREEQYNSTYRVVSVLTVLHQDWLNGKEYKCKVSNKALPAPIEKTISKAKGQPREPQVYTLPPSRDELTKNQVSLTCLVKGFYPSDIAVEWESNGQPENNYKTTPPVLDSDGSFFLYSKLTVDKSRWQQGNVFSCSVMHEALHNHYTQKSLSLSPGKIISFFLALTSTALLFLLFFLTLRFSVVKRGRKKLLYIFKQPFMRPVQTTQEEDGCSCRFPEEEEGGCELRVKFSRSADAPAYQQGQNQLYNELNLGRREEYDVLDKRRGRDPEMGGKPRRKNPQEGLYNELQKDKMAEAYSEIGMKGERRRGKGHDGLYQGLSTATKDTYDALHMQALPPR

SEQ ID NO: 7686 - protein, 455 aa, Artificial Sequence; identical to SEQ ID NO: 7662
  source: /note="Description of Artificial Sequence: Synthetic Chimeric Antigen Receptor"

SEQ ID NO: 7687 - protein, 458 aa, Artificial Sequence; identical to SEQ ID NO: 7681
  source: /note="Description of Artificial Sequence: Synthetic Chimeric Antigen Receptor"

SEQ ID NO: 7688 - protein, 484 aa, Artificial Sequence; identical to SEQ ID NO: 7682
  source: /note="Description of Artificial Sequence: Synthetic Chimeric Antigen Receptor"

SEQ ID NO: 7689 - protein, 487 aa, Artificial Sequence; identical to SEQ ID NO: 7683
  source: /note="Description of Artificial Sequence: Synthetic Chimeric Antigen Receptor"

SEQ ID NO: 7690 - protein, 670 aa, Artificial Sequence; identical to SEQ ID NO: 7684
  source: /note="Description of Artificial Sequence: Synthetic Chimeric Antigen Receptor"

SEQ ID NO: 7691 - protein, 673 aa, Artificial Sequence; identical to SEQ ID NO: 7685
  source: /note="Description of Artificial Sequence: Synthetic Chimeric Antigen Receptor"

SEQ ID NO: 7692 - protein, 455 aa, Artificial Sequence
  source: /note="Description of Artificial Sequence: Synthetic Chimeric Antigen Receptor"
MALPVTALLLPLALLLHAARPQVQLQESGPGLVKPSETLSLTCVVSGGSISSSNWWSWVRQPPGKGLEWIGEIYHSGSPNYNPSLKSRVTISVDKSKNQFSLKLSSVTAADTAVYYCARQTTAGSFDYWGQGTLVTVSSGGGGSGGGGSGGGGSDIQMTQSPSSLSASVGDRVTITCRASQSISSYLNWYQQKPGKAPKLLIYAASSLQSGVPSRFSGSGSGTDFTLTISSLQPEDFATYYCQQSYSTPPTFGQGTKVEIKGLAVSTISSFFPPGYQIYIWAPLAGTCGVLLLSLVITLYCKRGRKKLLYIFKQPFMRPVQTTQEEDGCSCRFPEEEEGGCELRVKFSRSADAPAYQQGQNQLYNELNLGRREEYDVLDKRRGRDPEMGGKPRRKNPQEGLYNELQKDKMAEAYSEIGMKGERRRGKGHDGLYQGLSTATKDTYDALHMQALPPR

SEQ ID NO: 7693 - protein, 458 aa, Artificial Sequence
  source: /note="Description of Artificial Sequence: Synthetic Chimeric Antigen Receptor"
MALPVTALLLPLALLLHAARPQVQLQESGPGLVKPSETLSLTCVVSGGSISSSNWWSWVRQPPGKGLEWIGEIYHSGSPNYNPSLKSRVTISVDKSKNQFSLKLSSVTAADTAVYYCARQTTAGSFDYWGQGTLVTVSSGGGGSGGGGSGGGGSDIQMTQSPSSLSASVGDRVTITCRASQSISSYLNWYQQKPGKAPKLLIYAASSLQSGVPSRFSGSGSGTDFTLTISSLQPEDFATYYCQQSYSTPPTFGQGTKVEIKGLAVSTISSFFPPGYQIISFFLALTSTALLFLLFFLTLRFSVVKRGRKKLLYIFKQPFMRPVQTTQEEDGCSCRFPEEEEGGCELRVKFSRSADAPAYQQGQNQLYNELNLGRREEYDVLDKRRGRDPEMGGKPRRKNPQEGLYNELQKDKMAEAYSEIGMKGERRRGKGHDGLYQGLSTATKDTYDALHMQALPPR

SEQ ID NO: 7694 - protein, 484 aa, Artificial Sequence
  source: /note="Description of Artificial Sequence: Synthetic Chimeric Antigen Receptor"
MALPVTALLLPLALLLHAARPQVQLQESGPGLVKPSETLSLTCVVSGGSISSSNWWSWVRQPPGKGLEWIGEIYHSGSPNYNPSLKSRVTISVDKSKNQFSLKLSSVTAADTAVYYCARQTTAGSFDYWGQGTLVTVSSGGGGSGGGGSGGGGSDIQMTQSPSSLSASVGDRVTITCRASQSISSYLNWYQQKPGKAPKLLIYAASSLQSGVPSRFSGSGSGTDFTLTISSLQPEDFATYYCQQSYSTPPTFGQGTKVEIKTTTPAPRPPTPAPTIASQPLSLRPEACRPAAGGAVHTRGLDFACDIYIWAPLAGTCGVLLLSLVITLYCKRGRKKLLYIFKQPFMRPVQTTQEEDGCSCRFPEEEEGGCELRVKFSRSADAPAYQQGQNQLYNELNLGRREEYDVLDKRRGRDPEMGGKPRRKNPQEGLYNELQKDKMAEAYSEIGMKGERRRGKGHDGLYQGLSTATKDTYDALHMQALPPR

SEQ ID NO: 7695 - protein, 487 aa, Artificial Sequence
  source: /note="Description of Artificial Sequence: Synthetic Chimeric Antigen Receptor"
MALPVTALLLPLALLLHAARPQVQLQESGPGLVKPSETLSLTCVVSGGSISSSNWWSWVRQPPGKGLEWIGEIYHSGSPNYNPSLKSRVTISVDKSKNQFSLKLSSVTAADTAVYYCARQTTAGSFDYWGQGTLVTVSSGGGGSGGGGSGGGGSDIQMTQSPSSLSASVGDRVTITCRASQSISSYLNWYQQKPGKAPKLLIYAASSLQSGVPSRFSGSGSGTDFTLTISSLQPEDFATYYCQQSYSTPPTFGQGTKVEIKTTTPAPRPPTPAPTIASQPLSLRPEACRPAAGGAVHTRGLDFACDIISFFLALTSTALLFLLFFLTLRFSVVKRGRKKLLYIFKQPFMRPVQTTQEEDGCSCRFPEEEEGGCELRVKFSRSADAPAYQQGQNQLYNELNLGRREEYDVLDKRRGRDPEMGGKPRRKNPQEGLYNELQKDKMAEAYSEIGMKGERRRGKGHDGLYQGLSTATKDTYDALHMQALPPR

SEQ ID NO: 7696 - protein, 670 aa, Artificial Sequence
  source: /note="Description of Artificial Sequence: Synthetic Chimeric Antigen Receptor"
MALPVTALLLPLALLLHAARPQVQLQESGPGLVKPSETLSLTCVVSGGSISSSNWWSWVRQPPGKGLEWIGEIYHSGSPNYNPSLKSRVTISVDKSKNQFSLKLSSVTAADTAVYYCARQTTAGSFDYWGQGTLVTVSSGGGGSGGGGSGGGGSDIQMTQSPSSLSASVGDRVTITCRASQSISSYLNWYQQKPGKAPKLLIYAASSLQSGVPSRFSGSGSGTDFTLTISSLQPEDFATYYCQQSYSTPPTFGQGTKVEIKEPKSPDKTHTCPPCPAPPVAGPSVFLFPPKPKDTLMIARTPEVTCVVVDVSHEDPEVKFNWYVDGVEVHNAKTKPREEQYNSTYRVVSVLTVLHQDWLNGKEYKCKVSNKALPAPIEKTISKAKGQPREPQVYTLPPSRDELTKNQVSLTCLVKGFYPSDIAVEWESNGQPENNYKTTPPVLDSDGSFFLYSKLTVDKSRWQQGNVFSCSVMHEALHNHYTQKSLSLSPGKIYIWAPLAGTCGVLLLSLVITLYCKRGRKKLLYIFKQPFMRPVQTTQEEDGCSCRFPEEEEGGCELRVKFSRSADAPAYQQGQNQLYNELNLGRREEYDVLDKRRGRDPEMGGKPRRKNPQEGLYNELQKDKMAEAYSEIGMKGERRRGKGHDGLYQGLSTATKDTYDALHMQALPPR

SEQ ID NO: 7697 - protein, 673 aa, Artificial Sequence
  source: /note="Description of Artificial Sequence: Synthetic Chimeric Antigen Receptor"
MALPVTALLLPLALLLHAARPQVQLQESGPGLVKPSETLSLTCVVSGGSISSSNWWSWVRQPPGKGLEWIGEIYHSGSPNYNPSLKSRVTISVDKSKNQFSLKLSSVTAADTAVYYCARQTTAGSFDYWGQGTLVTVSSGGGGSGGGGSGGGGSDIQMTQSPSSLSASVGDRVTITCRASQSISSYLNWYQQKPGKAPKLLIYAASSLQSGVPSRFSGSGSGTDFTLTISSLQPEDFATYYCQQSYSTPPTFGQGTKVEIKEPKSPDKTHTCPPCPAPPVAGPSVFLFPPKPKDTLMIARTPEVTCVVVDVSHEDPEVKFNWYVDGVEVHNAKTKPREEQYNSTYRVVSVLTVLHQDWLNGKEYKCKVSNKALPAPIEKTISKAKGQPREPQVYTLPPSRDELTKNQVSLTCLVKGFYPSDIAVEWESNGQPENNYKTTPPVLDSDGSFFLYSKLTVDKSRWQQGNVFSCSVMHEALHNHYTQKSLSLSPGKIISFFLALTSTALLFLLFFLTLRFSVVKRGRKKLLYIFKQPFMRPVQTTQEEDGCSCRFPEEEEGGCELRVKFSRSADAPAYQQGQNQLYNELNLGRREEYDVLDKRRGRDPEMGGKPRRKNPQEGLYNELQKDKMAEAYSEIGMKGERRRGKGHDGLYQGLSTATKDTYDALHMQALPPR

SEQ ID NO: 7698 - protein, 458 aa, Artificial Sequence
  source: /note="Description of Artificial Sequence: Synthetic Chimeric Antigen Receptor"
MALPVTALLLPLALLLHAARPEVQLQQSGPELVKPGASVKMSCKASGYTFTSYFIHWVKQKPGQGLEWIGFINPYNDGSKYNEKFKGKATLTSDKSSSTAYMELSSLTSEDSAVYYCTRDDGYYGYAMDYWGQGTSVTVSSGGGGSGGGGSGGGGSDIQMTQSPSSLSASLGERVSLTCRATQELSGYLSWLQQKPDGTIKRLIYAASTLDSGVPKRFSGNRSGSDYSLTISSLESEDFADYYCLQYAIYPYTFGGGTKLEIKRGLAVSTISSFFPPGYQIYIWAPLAGTCGVLLLSLVITLYCKRGRKKLLYIFKQPFMRPVQTTQEEDGCSCRFPEEEEGGCELRVKFSRSADAPAYQQGQNQLYNELNLGRREEYDVLDKRRGRDPEMGGKPRRKNPQEGLYNELQKDKMAEAYSEIGMKGERRRGKGHDGLYQGLSTATKDTYDALHMQALPPR

SEQ ID NO: 7699 - protein, 461 aa, Artificial Sequence
  source: /note="Description of Artificial Sequence: Synthetic Chimeric Antigen Receptor"
MALPVTALLLPLALLLHAARPEVQLQQSGPELVKPGASVKMSCKASGYTFTSYFIHWVKQKPGQGLEWIGFINPYNDGSKYNEKFKGKATLTSDKSSSTAYMELSSLTSEDSAVYYCTRDDGYYGYAMDYWGQGTSVTVSSGGGGSGGGGSGGGGSDIQMTQSPSSLSASLGERVSLTCRATQELSGYLSWLQQKPDGTIKRLIYAASTLDSGVPKRFSGNRSGSDYSLTISSLESEDFADYYCLQYAIYPYTFGGGTKLEIKRGLAVSTISSFFPPGYQIISFFLALTSTALLFLLFFLTLRFSVVKRGRKKLLYIFKQPFMRPVQTTQEEDGCSCRFPEEEEGGCELRVKFSRSADAPAYQQGQNQLYNELNLGRREEYDVLDKRRGRDPEMGGKPRRKNPQEGLYNELQKDKMAEAYSEIGMKGERRRGKGHDGLYQGLSTATKDTYDALHMQALPPR

SEQ ID NO: 7700 - protein, 487 aa, Artificial Sequence
  source: /note="Description of Artificial Sequence: Synthetic Chimeric Antigen Receptor"
MALPVTALLLPLALLLHAARPEVQLQQSGPELVKPGASVKMSCKASGYTFTSYFIHWVKQKPGQGLEWIGFINPYNDGSKYNEKFKGKATLTSDKSSSTAYMELSSLTSEDSAVYYCTRDDGYYGYAMDYWGQGTSVTVSSGGGGSGGGGSGGGGSDIQMTQSPSSLSASLGERVSLTCRATQELSGYLSWLQQKPDGTIKRLIYAASTLDSGVPKRFSGNRSGSDYSLTISSLESEDFADYYCLQYAIYPYTFGGGTKLEIKRTTTPAPRPPTPAPTIASQPLSLRPEACRPAAGGAVHTRGLDFACDIYIWAPLAGTCGVLLLSLVITLYCKRGRKKLLYIFKQPFMRPVQTTQEEDGCSCRFPEEEEGGCELRVKFSRSADAPAYQQGQNQLYNELNLGRREEYDVLDKRRGRDPEMGGKPRRKNPQEGLYNELQKDKMAEAYSEIGMKGERRRGKGHDGLYQGLSTATKDTYDALHMQALPPR

SEQ ID NO: 7701 - protein, 490 aa, Artificial Sequence
  source: /note="Description of Artificial Sequence: Synthetic Chimeric Antigen Receptor"
MALPVTALLLPLALLLHAARPEVQLQQSGPELVKPGASVKMSCKASGYTFTSYFIHWVKQKPGQGLEWIGFINPYNDGSKYNEKFKGKATLTSDKSSSTAYMELSSLTSEDSAVYYCTRDDGYYGYAMDYWGQGTSVTVSSGGGGSGGGGSGGGGSDIQMTQSPSSLSASLGERVSLTCRATQELSGYLSWLQQKPDGTIKRLIYAASTLDSGVPKRFSGNRSGSDYSLTISSLESEDFADYYCLQYAIYPYTFGGGTKLEIKRTTTPAPRPPTPAPTIASQPLSLRPEACRPAAGGAVHTRGLDFACDIISFFLALTSTALLFLLFFLTLRFSVVKRGRKKLLYIFKQPFMRPVQTTQEEDGCSCRFPEEEEGGCELRVKFSRSADAPAYQQGQNQLYNELNLGRREEYDVLDKRRGRDPEMGGKPRRKNPQEGLYNELQKDKMAEAYSEIGMKGERRRGKGHDGLYQGLSTATKDTYDALHMQALPPR

SEQ ID NO: 7702 - protein, 673 aa, Artificial Sequence
  source: /note="Description of Artificial Sequence: Synthetic Chimeric Antigen Receptor"
MALPVTALLLPLALLLHAARPEVQLQQSGPELVKPGASVKMSCKASGYTFTSYFIHWVKQKPGQGLEWIGFINPYNDGSKYNEKFKGKATLTSDKSSSTAYMELSSLTSEDSAVYYCTRDDGYYGYAMDYWGQGTSVTVSSGGGGSGGGGSGGGGSDIQMTQSPSSLSASLGERVSLTCRATQELSGYLSWLQQKPDGTIKRLIYAASTLDSGVPKRFSGNRSGSDYSLTISSLESEDFADYYCLQYAIYPYTFGGGTKLEIKREPKSPDKTHTCPPCPAPPVAGPSVFLFPPKPKDTLMIARTPEVTCVVVDVSHEDPEVKFNWYVDGVEVHNAKTKPREEQYNSTYRVVSVLTVLHQDWLNGKEYKCKVSNKALPAPIEKTISKAKGQPREPQVYTLPPSRDELTKNQVSLTCLVKGFYPSDIAVEWESNGQPENNYKTTPPVLDSDGSFFLYSKLTVDKSRWQQGNVFSCSVMHEALHNHYTQKSLSLSPGKIYIWAPLAGTCGVLLLSLVITLYCKRGRKKLLYIFKQPFMRPVQTTQEEDGCSCRFPEEEEGGCELRVKFSRSADAPAYQQGQNQLYNELNLGRREEYDVLDKRRGRDPEMGGKPRRKNPQEGLYNELQKDKMAEAYSEIGMKGERRRGKGHDGLYQGLSTATKDTYDALHMQALPPR

SEQ ID NO: 7703 - protein, 676 aa, Artificial Sequence
  source: /note="Description of Artificial Sequence: Synthetic Chimeric Antigen Receptor"
MALPVTALLLPLALLLHAARPEVQLQQSGPELVKPGASVKMSCKASGYTFTSYFIHWVKQKPGQGLEWIGFINPYNDGSKYNEKFKGKATLTSDKSSSTAYMELSSLTSEDSAVYYCTRDDGYYGYAMDYWGQGTSVTVSSGGGGSGGGGSGGGGSDIQMTQSPSSLSASLGERVSLTCRATQELSGYLSWLQQKPDGTIKRLIYAASTLDSGVPKRFSGNRSGSDYSLTISSLESEDFADYYCLQYAIYPYTFGGGTKLEIKREPKSPDKTHTCPPCPAPPVAGPSVFLFPPKPKDTLMIARTPEVTCVVVDVSHEDPEVKFNWYVDGVEVHNAKTKPREEQYNSTYRVVSVLTVLHQDWLNGKEYKCKVSNKALPAPIEKTISKAKGQPREPQVYTLPPSRDELTKNQVSLTCLVKGFYPSDIAVEWESNGQPENNYKTTPPVLDSDGSFFLYSKLTVDKSRWQQGNVFSCSVMHEALHNHYTQKSLSLSPGKIISFFLALTSTALLFLLFFLTLRFSVVKRGRKKLLYIFKQPFMRPVQTTQEEDGCSCRFPEEEEGGCELRVKFSRSADAPAYQQGQNQLYNELNLGRREEYDVLDKRRGRDPEMGGKPRRKNPQEGLYNELQKDKMAEAYSEIGMKGERRRGKGHDGLYQGLSTATKDTYDALHMQALPPR

SEQ ID NO: 7704 - protein, 463 aa, Artificial Sequence
  source: /note="Description of Artificial Sequence: Synthetic Chimeric Antigen Receptor"
MALPVTALLLPLALLLHAARPEVQLQQSGPELVKPGASVKMSCKASGYTFTSYVMHWVKQKPGQGLEWIGYINPYNDGTKYNEKFKGKATLTSDTSSSTAYMELNSLTSEDSAVYFSCCARPIYFDNDYFDYWGQGTTLKVSSGGGGSGGGGSGGGGSTIVLTQSPASLAVSLGQRATISCRASESVDSYGNSFMHWYQQKPGQPPKLLIYLASNLESGVPARFSGSGSRTDFTLTIDPVEADDAATYYCQQNNYDPWTFGGGTKLEIKGLAVSTISSFFPPGYQIYIWAPLAGTCGVLLLSLVITLYCKRGRKKLLYIFKQPFMRPVQTTQEEDGCSCRFPEEEEGGCELRVKFSRSADAPAYQQGQNQLYNELNLGRREEYDVLDKRRGRDPEMGGKPRRKNPQEGLYNELQKDKMAEAYSEIGMKGERRRGKGHDGLYQGLSTATKDTYDALHMQALPPR

SEQ ID NO: 7705 - protein, 466 aa, Artificial Sequence
  source: /note="Description of Artificial Sequence: Synthetic Chimeric Antigen Receptor"
MALPVTALLLPLALLLHAARPEVQLQQSGPELVKPGASVKMSCKASGYTFTSYVMHWVKQKPGQGLEWIGYINPYNDGTKYNEKFKGKATLTSDTSSSTAYMELNSLTSEDSAVYFSCCARPIYFDNDYFDYWGQGTTLKVSSGGGGSGGGGSGGGGSTIVLTQSPASLAVSLGQRATISCRASESVDSYGNSFMHWYQQKPGQPPKLLIYLASNLESGVPARFSGSGSRTDFTLTIDPVEADDAATYYCQQNNYDPWTFGGGTKLEIKGLAVSTISSFFPPGYQIISFFLALTSTALLFLLFFLTLRFSVVKRGRKKLLYIFKQPFMRPVQTTQEEDGCSCRFPEEEEGGCELRVKFSRSADAPAYQQGQNQLYNELNLGRREEYDVLDKRRGRDPEMGGKPRRKNPQEGLYNELQKDKMAEAYSEIGMKGERRRGKGHDGLYQGLSTATKDTYDALHMQALPPR

SEQ ID NO: 7706 - protein, 492 aa, Artificial Sequence
  source: /note="Description of Artificial Sequence: Synthetic Chimeric Antigen Receptor"
MALPVTALLLPLALLLHAARPEVQLQQSGPELVKPGASVKMSCKASGYTFTSYVMHWVKQKPGQGLEWIGYINPYNDGTKYNEKFKGKATLTSDTSSSTAYMELNSLTSEDSAVYFSCCARPIYFDNDYFDYWGQGTTLKVSSGGGGSGGGGSGGGGSTIVLTQSPASLAVSLGQRATISCRASESVDSYGNSFMHWYQQKPGQPPKLLIYLASNLESGVPARFSGSGSRTDFTLTIDPVEADDAATYYCQQNNYDPWTFGGGTKLEIKTTTPAPRPPTPAPTIASQPLSLRPEACRPAAGGAVHTRGLDFACDIYIWAPLAGTCGVLLLSLVITLYCKRGRKKLLYIFKQPFMRPVQTTQEEDGCSCRFPEEEEGGCELRVKFSRSADAPAYQQGQNQLYNELNLGRREEYDVLDKRRGRDPEMGGKPRRKNPQEGLYNELQKDKMAEAYSEIGMKGERRRGKGHDGLYQGLSTATKDTYDALHMQALPPR

SEQ ID NO: 7707 - protein, 495 aa, Artificial Sequence
  source: /note="Description of Artificial Sequence: Synthetic Chimeric Antigen Receptor"
MALPVTALLLPLALLLHAARPEVQLQQSGPELVKPGASVKMSCKASGYTFTSYVMHWVKQKPGQGLEWIGYINPYNDGTKYNEKFKGKATLTSDTSSSTAYMELNSLTSEDSAVYFSCCARPIYFDNDYFDYWGQGTTLKVSSGGGGSGGGGSGGGGSTIVLTQSPASLAVSLGQRATISCRASESVDSYGNSFMHWYQQKPGQPPKLLIYLASNLESGVPARFSGSGSRTDFTLTIDPVEADDAATYYCQQNNYDPWTFGGGTKLEIKTTTPAPRPPTPAPTIASQPLSLRPEACRPAAGGAVHTRGLDFACDIISFFLALTSTALLFLLFFLTLRFSVVKRGRKKLLYIFKQPFMRPVQTTQEEDGCSCRFPEEEEGGCELRVKFSRSADAPAYQQGQNQLYNELNLGRREEYDVLDKRRGRDPEMGGKPRRKNPQEGLYNELQKDKMAEAYSEIGMKGERRRGKGHDGLYQGLSTATKDTYDALHMQALPPR

SEQ ID NO: 7708 - protein, 678 aa, Artificial Sequence
  source: /note="Description of Artificial Sequence: Synthetic Chimeric Antigen Receptor"
MALPVTALLLPLALLLHAARPEVQLQQSGPELVKPGASVKMSCKASGYTFTSYVMHWVKQKPGQGLEWIGYINPYNDGTKYNEKFKGKATLTSDTSSSTAYMELNSLTSEDSAVYFSCCARPIYFDNDYFDYWGQGTTLKVSSGGGGSGGGGSGGGGSTIVLTQSPASLAVSLGQRATISCRASESVDSYGNSFMHWYQQKPGQPPKLLIYLASNLESGVPARFSGSGSRTDFTLTIDPVEADDAATYYCQQNNYDPWTFGGGTKLEIKEPKSPDKTHTCPPCPAPPVAGPSVFLFPPKPKDTLMIARTPEVTCVVVDVSHEDPEVKFNWYVDGVEVHNAKTKPREEQYNSTYRVVSVLTVLHQDWLNGKEYKCKVSNKALPAPIEKTISKAKGQPREPQVYTLPPSRDELTKNQVSLTCLVKGFYPSDIAVEWESNGQPENNYKTTPPVLDSDGSFFLYSKLTVDKSRWQQGNVFSCSVMHEALHNHYTQKSLSLSPGKIYIWAPLAGTCGVLLLSLVITLYCKRGRKKLLYIFKQPFMRPVQTTQEEDGCSCRFPEEEEGGCELRVKFSRSADAPAYQQGQNQLYNELNLGRREEYDVLDKRRGRDPEMGGKPRRKNPQEGLYNELQKDKMAEAYSEIGMKGERRRGKGHDGLYQGLSTATKDTYDALHMQALPPR

SEQ ID NO: 7709 - protein, 681 aa, Artificial Sequence
  source: /note="Description of Artificial Sequence: Synthetic Chimeric Antigen Receptor"
MALPVTALLLPLALLLHAARPEVQLQQSGPELVKPGASVKMSCKASGYTFTSYVMHWVKQKPGQGLEWIGYINPYNDGTKYNEKFKGKATLTSDTSSSTAYMELNSLTSEDSAVYFSCCARPIYFDNDYFDYWGQGTTLKVSSGGGGSGGGGSGGGGSTIVLTQSPASLAVSLGQRATISCRASESVDSYGNSFMHWYQQKPGQPPKLLIYLASNLESGVPARFSGSGSRTDFTLTIDPVEADDAATYYCQQNNYDPWTFGGGTKLEIKEPKSPDKTHTCPPCPAPPVAGPSVFLFPPKPKDTLMIARTPEVTCVVVDVSHEDPEVKFNWYVDGVEVHNAKTKPREEQYNSTYRVVSVLTVLHQDWLNGKEYKCKVSNKALPAPIEKTISKAKGQPREPQVYTLPPSRDELTKNQVSLTCLVKGFYPSDIAVEWESNGQPENNYKTTPPVLDSDGSFFLYSKLTVDKSRWQQGNVFSCSVMHEALHNHYTQKSLSLSPGKIISFFLALTSTALLFLLFFLTLRFSVVKRGRKKLLYIFKQPFMRPVQTTQEEDGCSCRFPEEEEGGCELRVKFSRSADAPAYQQGQNQLYNELNLGRREEYDVLDKRRGRDPEMGGKPRRKNPQEGLYNELQKDKMAEAYSEIGMKGERRRGKGHDGLYQGLSTATKDTYDALHMQALPPR

SEQ ID NO: 7710 - protein, 459 aa, Artificial Sequence
  source: /note="Description of Artificial Sequence: Synthetic Chimeric Antigen Receptor"
MALPVTALLLPLALLLHAARPEVQLQQSGPELVKPGASMKISCKASGYSFTGYTMNWVKQSHEKNLEWIGPINPYNDGTIYNPNFKGKATLTVDKASSTAYMELLSLTSDDPAVYYSCCARTDDYDDYTMDYWGQGTSVTVSSGGGGSGGGGSGGGGSEIQMTQTPSSLSASLGDRVTISCRASHDISNYLNWYQQKPDGTLKLLIYYTSRLHSGVPSRFSGSGSGTDYSLTISNLEQEDIATYFCQQGKTLLWTFGGGTKLEIKGLAVSTISSFFPPGYQIYIWAPLAGTCGVLLLSLVITLYCKRGRKKLLYIFKQPFMRPVQTTQEEDGCSCRFPEEEEGGCELRVKFSRSADAPAYQQGQNQLYNELNLGRREEYDVLDKRRGRDPEMGGKPRRKNPQEGLYNELQKDKMAEAYSEIGMKGERRRGKGHDGLYQGLSTATKDTYDALHMQALPPR

SEQ ID NO: 7711 - protein, 462 aa, Artificial Sequence
  source: /note="Description of Artificial Sequence: Synthetic Chimeric Antigen Receptor"
MALPVTALLLPLALLLHAARPEVQLQQSGPELVKPGASMKISCKASGYSFTGYTMNWVKQSHEKNLEWIGPINPYNDGTIYNPNFKGKATLTVDKASSTAYMELLSLTSDDPAVYYSCCARTDDYDDYTMDYWGQGTSVTVSSGGGGSGGGGSGGGGSEIQMTQTPSSLSASLGDRVTISCRASHDISNYLNWYQQKPDGTLKLLIYYTSRLHSGVPSRFSGSGSGTDYSLTISNLEQEDIATYFCQQGKTLLWTFGGGTKLEIKGLAVSTISSFFPPGYQIISFFLALTSTALLFLLFFLTLRFSVVKRGRKKLLYIFKQPFMRPVQTTQEEDGCSCRFPEEEEGGCELRVKFSRSADAPAYQQGQNQLYNELNLGRREEYDVLDKRRGRDPEMGGKPRRKNPQEGLYNELQKDKMAEAYSEIGMKGERRRGKGHDGLYQGLSTATKDTYDALHMQALPPR

SEQ ID NO: 7712 - protein, 488 aa, Artificial Sequence
  source: /note="Description of Artificial Sequence: Synthetic Chimeric Antigen Receptor"
MALPVTALLLPLALLLHAARPEVQLQQSGPELVKPGASMKISCKASGYSFTGYTMNWVKQSHEKNLEWIGPINPYNDGTIYNPNFKGKATLTVDKASSTAYMELLSLTSDDPAVYYSCCARTDDYDDYTMDYWGQGTSVTVSSGGGGSGGGGSGGGGSEIQMTQTPSSLSASLGDRVTISCRASHDISNYLNWYQQKPDGTLKLLIYYTSRLHSGVPSRFSGSGSGTDYSLTISNLEQEDIATYFCQQGKTLLWTFGGGTKLEIKTTTPAPRPPTPAPTIASQPLSLRPEACRPAAGGAVHTRGLDFACDIYIWAPLAGTCGVLLLSLVITLYCKRGRKKLLYIFKQPFMRPVQTTQEEDGCSCRFPEEEEGGCELRVKFSRSADAPAYQQGQNQLYNELNLGRREEYDVLDKRRGRDPEMGGKPRRKNPQEGLYNELQKDKMAEAYSEIGMKGERRRGKGHDGLYQGLSTATKDTYDALHMQALPPR

SEQ ID NO: 7713 - protein, 491 aa, Artificial Sequence
  source: /note="Description of Artificial Sequence: Synthetic Chimeric Antigen Receptor"
MALPVTALLLPLALLLHAARPEVQLQQSGPELVKPGASMKISCKASGYSFTGYTMNWVKQSHEKNLEWIGPINPYNDGTIYNPNFKGKATLTVDKASSTAYMELLSLTSDDPAVYYSCCARTDDYDDYTMDYWGQGTSVTVSSGGGGSGGGGSGGGGSEIQMTQTPSSLSASLGDRVTISCRASHDISNYLNWYQQKPDGTLKLLIYYTSRLHSGVPSRFSGSGSGTDYSLTISNLEQEDIATYFCQQGKTLLWTFGGGTKLEIKTTTPAPRPPTPAPTIASQPLSLRPEACRPAAGGAVHTRGLDFACDIISFFLALTSTALLFLLFFLTLRFSVVKRGRKKLLYIFKQPFMRPVQTTQEEDGCSCRFPEEEEGGCELRVKFSRSADAPAYQQGQNQLYNELNLGRREEYDVLDKRRGRDPEMGGKPRRKNPQEGLYNELQKDKMAEAYSEIGMKGERRRGKGHDGLYQGLSTATKDTYDALHMQALPPR

SEQ ID NO: 7714 - protein, 674 aa, Artificial Sequence
  source: /note="Description of Artificial Sequence: Synthetic Chimeric Antigen Receptor"
MALPVTALLLPLALLLHAARPEVQLQQSGPELVKPGASMKISCKASGYSFTGYTMNWVKQSHEKNLEWIGPINPYNDGTIYNPNFKGKATLTVDKASSTAYMELLSLTSDDPAVYYSCCARTDDYDDYTMDYWGQGTSVTVSSGGGGSGGGGSGGGGSEIQMTQTPSSLSASLGDRVTISCRASHDISNYLNWYQQKPDGTLKLLIYYTSRLHSGVPSRFSGSGSGTDYSLTISNLEQEDIATYFCQQGKTLLWTFGGGTKLEIKEPKSPDKTHTCPPCPAPPVAGPSVFLFPPKPKDTLMIARTPEVTCVVVDVSHEDPEVKFNWYVDGVEVHNAKTKPREEQYNSTYRVVSVLTVLHQDWLNGKEYKCKVSNKALPAPIEKTISKAKGQPREPQVYTLPPSRDELTKNQVSLTCLVKGFYPSDIAVEWESNGQPENNYKTTPPVLDSDGSFFLYSKLTVDKSRWQQGNVFSCSVMHEALHNHYTQKSLSLSPGKIYIWAPLAGTCGVLLLSLVITLYCKRGRKKLLYIFKQPFMRPVQTTQEEDGCSCRFPEEEEGGCELRVKFSRSADAPAYQQGQNQLYNELNLGRREEYDVLDKRRGRDPEMGGKPRRKNPQEGLYNELQKDKMAEAYSEIGMKGERRRGKGHDGLYQGLSTATKDTYDALHMQALPPR

SEQ ID NO: 7715 - protein, 677 aa, Artificial Sequence
  source: /note="Description of Artificial Sequence: Synthetic Chimeric Antigen Receptor"
MALPVTALLLPLALLLHAARPEVQLQQSGPELVKPGASMKISCKASGYSFTGYTMNWVKQSHEKNLEWIGPINPYNDGTIYNPNFKGKATLTVDKASSTAYMELLSLTSDDPAVYYSCCARTDDYDDYTMDYWGQGTSVTVSSGGGGSGGGGSGGGGSEIQMTQTPSSLSASLGDRVTISCRASHDISNYLNWYQQKPDGTLKLLIYYTSRLHSGVPSRFSGSGSGTDYSLTISNLEQEDIATYFCQQGKTLLWTFGGGTKLEIKEPKSPDKTHTCPPCPAPPVAGPSVFLFPPKPKDTLMIARTPEVTCVVVDVSHEDPEVKFNWYVDGVEVHNAKTKPREEQYNSTYRVVSVLTVLHQDWLNGKEYKCKVSNKALPAPIEKTISKAKGQPREPQVYTLPPSRDELTKNQVSLTCLVKGFYPSDIAVEWESNGQPENNYKTTPPVLDSDGSFFLYSKLTVDKSRWQQGNVFSCSVMHEALHNHYTQKSLSLSPGKIISFFLALTSTALLFLLFFLTLRFSVVKRGRKKLLYIFKQPFMRPVQTTQEEDGCSCRFPEEEEGGCELRVKFSRSADAPAYQQGQNQLYNELNLGRREEYDVLDKRRGRDPEMGGKPRRKNPQEGLYNELQKDKMAEAYSEIGMKGERRRGKGHDGLYQGLSTATKDTYDALHMQALPPR

SEQ ID NO: 7716 - protein, 464 aa, Artificial Sequence
  source: /note="Description of Artificial Sequence: Synthetic Chimeric Antigen Receptor"
MALPVTALLLPLALLLHAARPQVQLQQPGAELVKPGASVKLSCKASGYTFTRYWMHWVKQRPGQGLEWIGNIDPSDTETHYNQQFKDKATLTVDKSSSTAYMQLSSLTSEDSAVYYCAIYYGNPSYYAMDYWGQGTSVTVSSGGGGSGGGGSGGGGSDIVMTQSPSSLTVTAGEKVTMSCKSSQNLLNSGNQKKYLNWYQQKPGQPPKLLIYWASTRESGVPDRFTGSGSGTDFTLTISSVQAEDLAVYFCQNDYSYPFTFGAGTKLELKGLAVSTISSFFPPGYQIYIWAPLAGTCGVLLLSLVITLYCKRGRKKLLYIFKQPFMRPVQTTQEEDGCSCRFPEEEEGGCELRVKFSRSADAPAYQQGQNQLYNELNLGRREEYDVLDKRRGRDPEMGGKPRRKNPQEGLYNELQKDKMAEAYSEIGMKGERRRGKGHDGLYQGLSTATKDTYDALHMQALPPR

SEQ ID NO: 7717 - protein, 467 aa, Artificial Sequence
  source: /note="Description of Artificial Sequence: Synthetic Chimeric Antigen Receptor"
MALPVTALLLPLALLLHAARPQVQLQQPGAELVKPGASVKLSCKASGYTFTRYWMHWVKQRPGQGLEWIGNIDPSDTETHYNQQFKDKATLTVDKSSSTAYMQLSSLTSEDSAVYYCAIYYGNPSYYAMDYWGQGTSVTVSSGGGGSGGGGSGGGGSDIVMTQSPSSLTVTAGEKVTMSCKSSQNLLNSGNQKKYLNWYQQKPGQPPKLLIYWASTRESGVPDRFTGSGSGTDFTLTISSVQAEDLAVYFCQNDYSYPFTFGAGTKLELKGLAVSTISSFFPPGYQIISFFLALTSTALLFLLFFLTLRFSVVKRGRKKLLYIFKQPFMRPVQTTQEEDGCSCRFPEEEEGGCELRVKFSRSADAPAYQQGQNQLYNELNLGRREEYDVLDKRRGRDPEMGGKPRRKNPQEGLYNELQKDKMAEAYSEIGMKGERRRGKGHDGLYQGLSTATKDTYDALHMQALPPR

SEQ ID NO: 7718 - protein, 493 aa, Artificial Sequence
  source: /note="Description of Artificial Sequence: Synthetic Chimeric Antigen Receptor"
MALPVTALLLPLALLLHAARPQVQLQQPGAELVKPGASVKLSCKASGYTFTRYWMHWVKQRPGQGLEWIGNIDPSDTETHYNQQFKDKATLTVDKSSSTAYMQLSSLTSEDSAVYYCAIYYGNPSYYAMDYWGQGTSVTVSSGGGGSGGGGSGGGGSDIVMTQSPSSLTVTAGEKVTMSCKSSQNLLNSGNQKKYLNWYQQKPGQPPKLLIYWASTRESGVPDRFTGSGSGTDFTLTISSVQAEDLAVYFCQNDYSYPFTFGAGTKLELKTTTPAPRPPTPAPTIASQPLSLRPEACRPAAGGAVHTRGLDFACDIYIWAPLAGTCGVLLLSLVITLYCKRGRKKLLYIFKQPFMRPVQTTQEEDGCSCRFPEEEEGGCELRVKFSRSADAPAYQQGQNQLYNELNLGRREEYDVLDKRRGRDPEMGGKPRRKNPQEGLYNELQKDKMAEAYSEIGMKGERRRGKGHDGLYQGLSTATKDTYDALHMQALPPR

SEQ ID NO: 7719 - protein, 496 aa, Artificial Sequence
  source: /note="Description of Artificial Sequence: Synthetic Chimeric Antigen Receptor"
MALPVTALLLPLALLLHAARPQVQLQQPGAELVKPGASVKLSCKASGYTFTRYWMHWVKQRPGQGLEWIGNIDPSDTETHYNQQFKDKATLTVDKSSSTAYMQLSSLTSEDSAVYYCAIYYGNPSYYAMDYWGQGTSVTVSSGGGGSGGGGSGGGGSDIVMTQSPSSLTVTAGEKVTMSCKSSQNLLNSGNQKKYLNWYQQKPGQPPKLLIYWASTRESGVPDRFTGSGSGTDFTLTISSVQAEDLAVYFCQNDYSYPFTFGAGTKLELKTTTPAPRPPTPAPTIASQPLSLRPEACRPAAGGAVHTRGLDFACDIISFFLALTSTALLFLLFFLTLRFSVVKRGRKKLLYIFKQPFMRPVQTTQEEDGCSCRFPEEEEGGCELRVKFSRSADAPAYQQGQNQLYNELNLGRREEYDVLDKRRGRDPEMGGKPRRKNPQEGLYNELQKDKMAEAYSEIGMKGERRRGKGHDGLYQGLSTATKDTYDALHMQALPPR

SEQ ID NO: 7720 - protein, 679 aa, Artificial Sequence
  source: /note="Description of Artificial Sequence: Synthetic Chimeric Antigen Receptor"
MALPVTALLLPLALLLHAARPQVQLQQPGAELVKPGASVKLSCKASGYTFTRYWMHWVKQRPGQGLEWIGNIDPSDTETHYNQQFKDKATLTVDKSSSTAYMQLSSLTSEDSAVYYCAIYYGNPSYYAMDYWGQGTSVTVSSGGGGSGGGGSGGGGSDIVMTQSPSSLTVTAGEKVTMSCKSSQNLLNSGNQKKYLNWYQQKPGQPPKLLIYWASTRESGVPDRFTGSGSGTDFTLTISSVQAEDLAVYFCQNDYSYPFTFGAGTKLELKEPKSPDKTHTCPPCPAPPVAGPSVFLFPPKPKDTLMIARTPEVTCVVVDVSHEDPEVKFNWYVDGVEVHNAKTKPREEQYNSTYRVVSVLTVLHQDWLNGKEYKCKVSNKALPAPIEKTISKAKGQPREPQVYTLPPSRDELTKNQVSLTCLVKGFYPSDIAVEWESNGQPENNYKTTPPVLDSDGSFFLYSKLTVDKSRWQQGNVFSCSVMHEALHNHYTQKSLSLSPGKIYIWAPLAGTCGVLLLSLVITLYCKRGRKKLLYIFKQPFMRPVQTTQEEDGCSCRFPEEEEGGCELRVKFSRSADAPAYQQGQNQLYNELNLGRREEYDVLDKRRGRDPEMGGKPRRKNPQEGLYNELQKDKMAEAYSEIGMKGERRRGKGHDGLYQGLSTATKDTYDALHMQALPPR

SEQ ID NO: 7721 - protein, 682 aa, Artificial Sequence
  source: /note="Description of Artificial Sequence: Synthetic Chimeric Antigen Receptor"
MALPVTALLLPLALLLHAARPQVQLQQPGAELVKPGASVKLSCKASGYTFTRYWMHWVKQRPGQGLEWIGNIDPSDTETHYNQQFKDKATLTVDKSSSTAYMQLSSLTSEDSAVYYCAIYYGNPSYYAMDYWGQGTSVTVSSGGGGSGGGGSGGGGSDIVMTQSPSSLTVTAGEKVTMSCKSSQNLLNSGNQKKYLNWYQQKPGQPPKLLIYWASTRESGVPDRFTGSGSGTDFTLTISSVQAEDLAVYFCQNDYSYPFTFGAGTKLELKEPKSPDKTHTCPPCPAPPVAGPSVFLFPPKPKDTLMIARTPEVTCVVVDVSHEDPEVKFNWYVDGVEVHNAKTKPREEQYNSTYRVVSVLTVLHQDWLNGKEYKCKVSNKALPAPIEKTISKAKGQPREPQVYTLPPSRDELTKNQVSLTCLVKGFYPSDIAVEWESNGQPENNYKTTPPVLDSDGSFFLYSKLTVDKSRWQQGNVFSCSVMHEALHNHYTQKSLSLSPGKIISFFLALTSTALLFLLFFLTLRFSVVKRGRKKLLYIFKQPFMRPVQTTQEEDGCSCRFPEEEEGGCELRVKFSRSADAPAYQQGQNQLYNELNLGRREEYDVLDKRRGRDPEMGGKPRRKNPQEGLYNELQKDKMAEAYSEIGMKGERRRGKGHDGLYQGLSTATKDTYDALHMQALPPR

SEQ ID NO: 7722 - protein, 457 aa, Artificial Sequence
  source: /note="Description of Artificial Sequence: Synthetic Chimeric Antigen Receptor"
MALPVTALLLPLALLLHAARPEVQLQQSGPELVKPGASVKMSCKASGYIFTSYVMYWVKQKPGQGLEWIGYINPYNDGTKYNEKFKGKATLTSDKSSSTAYMELSSLTSEDSAVYYSCCARYYDYDYYFDYWGQGTTLTVSSGGGGSGGGGSGGGGSDIQMTQSPSSLSASLGGKVTITCKASQDINKYIAWYQHKPGKGPRLLIHYTSTLQPGIPSRFSGSGSGRDYSFSISNLEPEDIATYYCLQYDYLWTFGGGTKLEIKGLAVSTISSFFPPGYQIYIWAPLAGTCGVLLLSLVITLYCKRGRKKLLYIFKQPFMRPVQTTQEEDGCSCRFPEEEEGGCELRVKFSRSADAPAYQQGQNQLYNELNLGRREEYDVLDKRRGRDPEMGGKPRRKNPQEGLYNELQKDKMAEAYSEIGMKGERRRGKGHDGLYQGLSTATKDTYDALHMQALPPR

SEQ ID NO: 7723 - protein, 460 aa, Artificial Sequence
  source: /note="Description of Artificial Sequence: Synthetic Chimeric Antigen Receptor"
MALPVTALLLPLALLLHAARPEVQLQQSGPELVKPGASVKMSCKASGYIFTSYVMYWVKQKPGQGLEWIGYINPYNDGTKYNEKFKGKATLTSDKSSSTAYMELSSLTSEDSAVYYSCCARYYDYDYYFDYWGQGTTLTVSSGGGGSGGGGSGGGGSDIQMTQSPSSLSASLGGKVTITCKASQDINKYIAWYQHKPGKGPRLLIHYTSTLQPGIPSRFSGSGSGRDYSFSISNLEPEDIATYYCLQYDYLWTFGGGTKLEIKGLAVSTISSFFPPGYQIISFFLALTSTALLFLLFFLTLRFSVVKRGRKKLLYIFKQPFMRPVQTTQEEDGCSCRFPEEEEGGCELRVKFSRSADAPAYQQGQNQLYNELNLGRREEYDVLDKRRGRDPEMGGKPRRKNPQEGLYNELQKDKMAEAYSEIGMKGERRRGKGHDGLYQGLSTATKDTYDALHMQALPPR

SEQ ID NO: 7724 - protein, 486 aa, Artificial Sequence
  source: /note="Description of Artificial Sequence: Synthetic Chimeric Antigen Receptor"
MALPVTALLLPLALLLHAARPEVQLQQSGPELVKPGASVKMSCKASGYIFTSYVMYWVKQKPGQGLEWIGYINPYNDGTKYNEKFKGKATLTSDKSSSTAYMELSSLTSEDSAVYYSCCARYYDYDYYFDYWGQGTTLTVSSGGGGSGGGGSGGGGSDIQMTQSPSSLSASLGGKVTITCKASQDINKYIAWYQHKPGKGPRLLIHYTSTLQPGIPSRFSGSGSGRDYSFSISNLEPEDIATYYCLQYDYLWTFGGGTKLEIKTTTPAPRPPTPAPTIASQPLSLRPEACRPAAGGAVHTRGLDFACDIYIWAPLAGTCGVLLLSLVITLYCKRGRKKLLYIFKQPFMRPVQTTQEEDGCSCRFPEEEEGGCELRVKFSRSADAPAYQQGQNQLYNELNLGRREEYDVLDKRRGRDPEMGGKPRRKNPQEGLYNELQKDKMAEAYSEIGMKGERRRGKGHDGLYQGLSTATKDTYDALHMQALPPR

SEQ ID NO: 7725 - protein, 489 aa, Artificial Sequence
  source: /note="Description of Artificial Sequence: Synthetic Chimeric Antigen Receptor"
MALPVTALLLPLALLLHAARPEVQLQQSGPELVKPGASVKMSCKASGYIFTSYVMYWVKQKPGQGLEWIGYINPYNDGTKYNEKFKGKATLTSDKSSSTAYMELSSLTSEDSAVYYSCCARYYDYDYYFDYWGQGTTLTVSSGGGGSGGGGSGGGGSDIQMTQSPSSLSASLGGKVTITCKASQDINKYIAWYQHKPGKGPRLLIHYTSTLQPGIPSRFSGSGSGRDYSFSISNLEPEDIATYYCLQYDYLWTFGGGTKLEIKTTTPAPRPPTPAPTIASQPLSLRPEACRPAAGGAVHTRGLDFACDIISFFLALTSTALLFLLFFLTLRFSVVKRGRKKLLYIFKQPFMRPVQTTQEEDGCSCRFPEEEEGGCELRVKFSRSADAPAYQQGQNQLYNELNLGRREEYDVLDKRRGRDPEMGGKPRRKNPQEGLYNELQKDKMAEAYSEIGMKGERRRGKGHDGLYQGLSTATKDTYDALHMQALPPR

SEQ ID NO: 7726 - protein, 672 aa, Artificial Sequence
  source: /note="Description of Artificial Sequence: Synthetic Chimeric Antigen Receptor"
MALPVTALLLPLALLLHAARPEVQLQQSGPELVKPGASVKMSCKASGYIFTSYVMYWVKQKPGQGLEWIGYINPYNDGTKYNEKFKGKATLTSDKSSSTAYMELSSLTSEDSAVYYSCCARYYDYDYYFDYWGQGTTLTVSSGGGGSGGGGSGGGGSDIQMTQSPSSLSASLGGKVTITCKASQDINKYIAWYQHKPGKGPRLLIHYTSTLQPGIPSRFSGSGSGRDYSFSISNLEPEDIATYYCLQYDYLWTFGGGTKLEIKEPKSPDKTHTCPPCPAPPVAGPSVFLFPPKPKDTLMIARTPEVTCVVVDVSHEDPEVKFNWYVDGVEVHNAKTKPREEQYNSTYRVVSVLTVLHQDWLNGKEYKCKVSNKALPAPIEKTISKAKGQPREPQVYTLPPSRDELTKNQVSLTCLVKGFYPSDIAVEWESNGQPENNYKTTPPVLDSDGSFFLYSKLTVDKSRWQQGNVFSCSVMHEALHNHYTQKSLSLSPGKIYIWAPLAGTCGVLLLSLVITLYCKRGRKKLLYIFKQPFMRPVQTTQEEDGCSCRFPEEEEGGCELRVKFSRSADAPAYQQGQNQLYNELNLGRREEYDVLDKRRGRDPEMGGKPRRKNPQEGLYNELQKDKMAEAYSEIGMKGERRRGKGHDGLYQGLSTATKDTYDALHMQALPPR

SEQ ID NO: 7727 - protein, 675 aa, Artificial Sequence
  source: /note="Description of Artificial Sequence: Synthetic Chimeric Antigen Receptor"
MALPVTALLLPLALLLHAARPEVQLQQSGPELVKPGASVKMSCKASGYIFTSYVMYWVKQKPGQGLEWIGYINPYNDGTKYNEKFKGKATLTSDKSSSTAYMELSSLTSEDSAVYYSCCARYYDYDYYFDYWGQGTTLTVSSGGGGSGGGGSGGGGSDIQMTQSPSSLSASLGGKVTITCKASQDINKYIAWYQHKPGKGPRLLIHYTSTLQPGIPSRFSGSGSGRDYSFSISNLEPEDIATYYCLQYDYLWTFGGGTKLEIKEPKSPDKTHTCPPCPAPPVAGPSVFLFPPKPKDTLMIARTPEVTCVVVDVSHEDPEVKFNWYVDGVEVHNAKTKPREEQYNSTYRVVSVLTVLHQDWLNGKEYKCKVSNKALPAPIEKTISKAKGQPREPQVYTLPPSRDELTKNQVSLTCLVKGFYPSDIAVEWESNGQPENNYKTTPPVLDSDGSFFLYSKLTVDKSRWQQGNVFSCSVMHEALHNHYTQKSLSLSPGKIISFFLALTSTALLFLLFFLTLRFSVVKRGRKKLLYIFKQPFMRPVQTTQEEDGCSCRFPEEEEGGCELRVKFSRSADAPAYQQGQNQLYNELNLGRREEYDVLDKRRGRDPEMGGKPRRKNPQEGLYNELQKDKMAEAYSEIGMKGERRRGKGHDGLYQGLSTATKDTYDALHMQALPPR

SEQ ID NO: 7728 - protein, 458 aa, Artificial Sequence
  source: /note="Description of Artificial Sequence: Synthetic Chimeric Antigen Receptor"
MALPVTALLLPLALLLHAARPEVQLRQSGPELVKPGASVKMSCKASGYTFTSYFMHWVKQKPGQGLEWIGFINPYNDGTKYNEKFKGKATLTSDKSSSTAYMELNSLTSEDSAVYYCTRDDGYYDYAMDYWGQGTSVTVSSGGGGSGGGGSGGGGSDIQMTQSPSSLSASLGERVSLTCRASQEISVYLSWLQQKPDGTIKRLIYAASTLDSGVPERFSGSRSGSDYSLTISSLESEDFADYYCLQYASYPYTFGGGTKLEIKRGLAVSTISSFFPPGYQIYIWAPLAGTCGVLLLSLVITLYCKRGRKKLLYIFKQPFMRPVQTTQEEDGCSCRFPEEEEGGCELRVKFSRSADAPAYQQGQNQLYNELNLGRREEYDVLDKRRGRDPEMGGKPRRKNPQEGLYNELQKDKMAEAYSEIGMKGERRRGKGHDGLYQGLSTATKDTYDALHMQALPPR

SEQ ID NO: 7729 - protein, 461 aa, Artificial Sequence
  source: /note="Description of Artificial Sequence: Synthetic Chimeric Antigen Receptor"
MALPVTALLLPLALLLHAARPEVQLRQSGPELVKPGASVKMSCKASGYTFTSYFMHWVKQKPGQGLEWIGFINPYNDGTKYNEKFKGKATLTSDKSSSTAYMELNSLTSEDSAVYYCTRDDGYYDYAMDYWGQGTSVTVSSGGGGSGGGGSGGGGSDIQMTQSPSSLSASLGERVSLTCRASQEISVYLSWLQQKPDGTIKRLIYAASTLDSGVPERFSGSRSGSDYSLTISSLESEDFADYYCLQYASYPYTFGGGTKLEIKRGLAVSTISSFFPPGYQIISFFLALTSTALLFLLFFLTLRFSVVKRGRKKLLYIFKQPFMRPVQTTQEEDGCSCRFPEEEEGGCELRVKFSRSADAPAYQQGQNQLYNELNLGRREEYDVLDKRRGRDPEMGGKPRRKNPQEGLYNELQKDKMAEAYSEIGMKGERRRGKGHDGLYQGLSTATKDTYDALHMQALPPR

SEQ ID NO: 7730 - protein, 487 aa, Artificial Sequence
  source: /note="Description of Artificial Sequence: Synthetic Chimeric Antigen Receptor"
MALPVTALLLPLALLLHAARPEVQLRQSGPELVKPGASVKMSCKASGYTFTSYFMHWVKQKPGQGLEWIGFINPYNDGTKYNEKFKGKATLTSDKSSSTAYMELNSLTSEDSAVYYCTRDDGYYDYAMDYWGQGTSVTVSSGGGGSGGGGSGGGGSDIQMTQSPSSLSASLGERVSLTCRASQEISVYLSWLQQKPDGTIKRLIYAASTLDSGVPERFSGSRSGSDYSLTISSLESEDFADYYCLQYASYPYTFGGGTKLEIKRTTTPAPRPPTPAPTIASQPLSLRPEACRPAAGGAVHTRGLDFACDIYIWAPLAGTCGVLLLSLVITLYCKRGRKKLLYIFKQPFMRPVQTTQEEDGCSCRFPEEEEGGCELRVKFSRSADAPAYQQGQNQLYNELNLGRREEYDVLDKRRGRDPEMGGKPRRKNPQEGLYNELQKDKMAEAYSEIGMKGERRRGKGHDGLYQGLSTATKDTYDALHMQALPPR

SEQ ID NO: 7731 - protein, 490 aa, Artificial Sequence
  source: /note="Description of Artificial Sequence: Synthetic Chimeric Antigen Receptor"
MALPVTALLLPLALLLHAARPEVQLRQSGPELVKPGASVKMSCKASGYTFTSYFMHWVKQKPGQGLEWIGFINPYNDGTKYNEKFKGKATLTSDKSSSTAYMELNSLTSEDSAVYYCTRDDGYYDYAMDYWGQGTSVTVSSGGGGSGGGGSGGGGSDIQMTQSPSSLSASLGERVSLTCRASQEISVYLSWLQQKPDGTIKRLIYAASTLDSGVPERFSGSRSGSDYSLTISSLESEDFADYYCLQYASYPYTFGGGTKLEIKRTTTPAPRPPTPAPTIASQPLSLRPEACRPAAGGAVHTRGLDFACDIISFFLALTSTALLFLLFFLTLRFSVVKRGRKKLLYIFKQPFMRPVQTTQEEDGCSCRFPEEEEGGCELRVKFSRSADAPAYQQGQNQLYNELNLGRREEYDVLDKRRGRDPEMGGKPRRKNPQEGLYNELQKDKMAEAYSEIGMKGERRRGKGHDGLYQGLSTATKDTYDALHMQALPPR

SEQ ID NO: 7732 - protein, 673 aa, Artificial Sequence
  source: /note="Description of Artificial Sequence: Synthetic Chimeric Antigen Receptor"
MALPVTALLLPLALLLHAARPEVQLRQSGPELVKPGASVKMSCKASGYTFTSYFMHWVKQKPGQGLEWIGFINPYNDGTKYNEKFKGKATLTSDKSSSTAYMELNSLTSEDSAVYYCTRDDGYYDYAMDYWGQGTSVTVSSGGGGSGGGGSGGGGSDIQMTQSPSSLSASLGERVSLTCRASQEISVYLSWLQQKPDGTIKRLIYAASTLDSGVPERFSGSRSGSDYSLTISSLESEDFADYYCLQYASYPYTFGGGTKLEIKREPKSPDKTHTCPPCPAPPVAGPSVFLFPPKPKDTLMIARTPEVTCVVVDVSHEDPEVKFNWYVDGVEVHNAKTKPREEQYNSTYRVVSVLTVLHQDWLNGKEYKCKVSNKALPAPIEKTISKAKGQPREPQVYTLPPSRDELTKNQVSLTCLVKGFYPSDIAVEWESNGQPENNYKTTPPVLDSDGSFFLYSKLTVDKSRWQQGNVFSCSVMHEALHNHYTQKSLSLSPGKIYIWAPLAGTCGVLLLSLVITLYCKRGRKKLLYIFKQPFMRPVQTTQEEDGCSCRFPEEEEGGCELRVKFSRSADAPAYQQGQNQLYNELNLGRREEYDVLDKRRGRDPEMGGKPRRKNPQEGLYNELQKDKMAEAYSEIGMKGERRRGKGHDGLYQGLSTATKDTYDALHMQALPPR

SEQ ID NO: 7733 - protein, 676 aa, Artificial Sequence
  source: /note="Description of Artificial Sequence: Synthetic Chimeric Antigen Receptor"
MALPVTALLLPLALLLHAARPEVQLRQSGPELVKPGASVKMSCKASGYTFTSYFMHWVKQKPGQGLEWIGFINPYNDGTKYNEKFKGKATLTSDKSSSTAYMELNSLTSEDSAVYYCTRDDGYYDYAMDYWGQGTSVTVSSGGGGSGGGGSGGGGSDIQMTQSPSSLSASLGERVSLTCRASQEISVYLSWLQQKPDGTIKRLIYAASTLDSGVPERFSGSRSGSDYSLTISSLESEDFADYYCLQYASYPYTFGGGTKLEIKREPKSPDKTHTCPPCPAPPVAGPSVFLFPPKPKDTLMIARTPEVTCVVVDVSHEDPEVKFNWYVDGVEVHNAKTKPREEQYNSTYRVVSVLTVLHQDWLNGKEYKCKVSNKALPAPIEKTISKAKGQPREPQVYTLPPSRDELTKNQVSLTCLVKGFYPSDIAVEWESNGQPENNYKTTPPVLDSDGSFFLYSKLTVDKSRWQQGNVFSCSVMHEALHNHYTQKSLSLSPGKIISFFLALTSTALLFLLFFLTLRFSVVKRGRKKLLYIFKQPFMRPVQTTQEEDGCSCRFPEEEEGGCELRVKFSRSADAPAYQQGQNQLYNELNLGRREEYDVLDKRRGRDPEMGGKPRRKNPQEGLYNELQKDKMAEAYSEIGMKGERRRGKGHDGLYQGLSTATKDTYDALHMQALPPR

SEQ ID NO: 7734 - protein, 457 aa, Artificial Sequence
  source: /note="Description of Artificial Sequence: Synthetic Chimeric Antigen Receptor"
MALPVTALLLPLALLLHAARPEVQLQQSGAELVRPGASVKLSCTASGFNIKDDYIHWVKQRPEQGLEWIGWIDPEKGDTAYASKFQDKATITSDTSSNTAYLQLSSLTSEDTAVYYCTLTGRFDYWGQGTTLTVSSGGGGSGGGGSGGGGSDIVMSQSPSSLAVSVGEKVTMSCKSSQSLLYSSNQKNNLAWYQQKPGQSPKLLIYWASTRESGVPDRFTGSGSGTDFTLTISSVQAEDLAVYYCQQYYSYRTFGGGTKLEIKGLAVSTISSFFPPGYQIYIWAPLAGTCGVLLLSLVITLYCKRGRKKLLYIFKQPFMRPVQTTQEEDGCSCRFPEEEEGGCELRVKFSRSADAPAYQQGQNQLYNELNLGRREEYDVLDKRRGRDPEMGGKPRRKNPQEGLYNELQKDKMAEAYSEIGMKGERRRGKGHDGLYQGLSTATKDTYDALHMQALPPR

SEQ ID NO: 7735 - protein, 460 aa, Artificial Sequence
  source: /note="Description of Artificial Sequence: Synthetic Chimeric Antigen Receptor"
MALPVTALLLPLALLLHAARPEVQLQQSGAELVRPGASVKLSCTASGFNIKDDYIHWVKQRPEQGLEWIGWIDPEKGDTAYASKFQDKATITSDTSSNTAYLQLSSLTSEDTAVYYCTLTGRFDYWGQGTTLTVSSGGGGSGGGGSGGGGSDIVMSQSPSSLAVSVGEKVTMSCKSSQSLLYSSNQKNNLAWYQQKPGQSPKLLIYWASTRESGVPDRFTGSGSGTDFTLTISSVQAEDLAVYYCQQYYSYRTFGGGTKLEIKGLAVSTISSFFPPGYQIISFFLALTSTALLFLLFFLTLRFSVVKRGRKKLLYIFKQPFMRPVQTTQEEDGCSCRFPEEEEGGCELRVKFSRSADAPAYQQGQNQLYNELNLGRREEYDVLDKRRGRDPEMGGKPRRKNPQEGLYNELQKDKMAEAYSEIGMKGERRRGKGHDGLYQGLSTATKDTYDALHMQALPPR

SEQ ID NO: 7736 - protein, 486 aa, Artificial Sequence
  source: /note="Description of Artificial Sequence: Synthetic Chimeric Antigen Receptor"
MALPVTALLLPLALLLHAARPEVQLQQSGAELVRPGASVKLSCTASGFNIKDDYIHWVKQRPEQGLEWIGWIDPEKGDTAYASKFQDKATITSDTSSNTAYLQLSSLTSEDTAVYYCTLTGRFDYWGQGTTLTVSSGGGGSGGGGSGGGGSDIVMSQSPSSLAVSVGEKVTMSCKSSQSLLYSSNQKNNLAWYQQKPGQSPKLLIYWASTRESGVPDRFTGSGSGTDFTLTISSVQAEDLAVYYCQQYYSYRTFGGGTKLEIKTTTPAPRPPTPAPTIASQPLSLRPEACRPAAGGAVHTRGLDFACDIYIWAPLAGTCGVLLLSLVITLYCKRGRKKLLYIFKQPFMRPVQTTQEEDGCSCRFPEEEEGGCELRVKFSRSADAPAYQQGQNQLYNELNLGRREEYDVLDKRRGRDPEMGGKPRRKNPQEGLYNELQKDKMAEAYSEIGMKGERRRGKGHDGLYQGLSTATKDTYDALHMQALPPR

SEQ ID NO: 7737 - protein, 489 aa, Artificial Sequence
  source: /note="Description of Artificial Sequence: Synthetic Chimeric Antigen Receptor"
MALPVTALLLPLALLLHAARPEVQLQQSGAELVRPGASVKLSCTASGFNIKDDYIHWVKQRPEQGLEWIGWIDPEKGDTAYASKFQDKATITSDTSSNTAYLQLSSLTSEDTAVYYCTLTGRFDYWGQGTTLTVSSGGGGSGGGGSGGGGSDIVMSQSPSSLAVSVGEKVTMSCKSSQSLLYSSNQKNNLAWYQQKPGQSPKLLIYWASTRESGVPDRFTGSGSGTDFTLTISSVQAEDLAVYYCQQYYSYRTFGGGTKLEIKTTTPAPRPPTPAPTIASQPLSLRPEACRPAAGGAVHTRGLDFACDIISFFLALTSTALLFLLFFLTLRFSVVKRGRKKLLYIFKQPFMRPVQTTQEEDGCSCRFPEEEEGGCELRVKFSRSADAPAYQQGQNQLYNELNLGRREEYDVLDKRRGRDPEMGGKPRRKNPQEGLYNELQKDKMAEAYSEIGMKGERRRGKGHDGLYQGLSTATKDTYDALHMQALPPR

SEQ ID NO: 7738 - protein, 672 aa, Artificial Sequence
  source: /note="Description of Artificial Sequence: Synthetic Chimeric Antigen Receptor"
MALPVTALLLPLALLLHAARPEVQLQQSGAELVRPGASVKLSCTASGFNIKDDYIHWVKQRPEQGLEWIGWIDPEKGDTAYASKFQDKATITSDTSSNTAYLQLSSLTSEDTAVYYCTLTGRFDYWGQGTTLTVSSGGGGSGGGGSGGGGSDIVMSQSPSSLAVSVGEKVTMSCKSSQSLLYSSNQKNNLAWYQQKPGQSPKLLIYWASTRESGVPDRFTGSGSGTDFTLTISSVQAEDLAVYYCQQYYSYRTFGGGTKLEIKEPKSPDKTHTCPPCPAPPVAGPSVFLFPPKPKDTLMIARTPEVTCVVVDVSHEDPEVKFNWYVDGVEVHNAKTKPREEQYNSTYRVVSVLTVLHQDWLNGKEYKCKVSNKALPAPIEKTISKAKGQPREPQVYTLPPSRDELTKNQVSLTCLVKGFYPSDIAVEWESNGQPENNYKTTPPVLDSDGSFFLYSKLTVDKSRWQQGNVFSCSVMHEALHNHYTQKSLSLSPGKIYIWAPLAGTCGVLLLSLVITLYCKRGRKKLLYIFKQPFMRPVQTTQEEDGCSCRFPEEEEGGCELRVKFSRSADAPAYQQGQNQLYNELNLGRREEYDVLDKRRGRDPEMGGKPRRKNPQEGLYNELQKDKMAEAYSEIGMKGERRRGKGHDGLYQGLSTATKDTYDALHMQALPPR

SEQ ID NO: 7739 - protein, 675 aa, Artificial Sequence
  source: /note="Description of Artificial Sequence: Synthetic Chimeric Antigen Receptor"
MALPVTALLLPLALLLHAARPEVQLQQSGAELVRPGASVKLSCTASGFNIKDDYIHWVKQRPEQGLEWIGWIDPEKGDTAYASKFQDKATITSDTSSNTAYLQLSSLTSEDTAVYYCTLTGRFDYWGQGTTLTVSSGGGGSGGGGSGGGGSDIVMSQSPSSLAVSVGEKVTMSCKSSQSLLYSSNQKNNLAWYQQKPGQSPKLLIYWASTRESGVPDRFTGSGSGTDFTLTISSVQAEDLAVYYCQQYYSYRTFGGGTKLEIKEPKSPDKTHTCPPCPAPPVAGPSVFLFPPKPKDTLMIARTPEVTCVVVDVSHEDPEVKFNWYVDGVEVHNAKTKPREEQYNSTYRVVSVLTVLHQDWLNGKEYKCKVSNKALPAPIEKTISKAKGQPREPQVYTLPPSRDELTKNQVSLTCLVKGFYPSDIAVEWESNGQPENNYKTTPPVLDSDGSFFLYSKLTVDKSRWQQGNVFSCSVMHEALHNHYTQKSLSLSPGKIISFFLALTSTALLFLLFFLTLRFSVVKRGRKKLLYIFKQPFMRPVQTTQEEDGCSCRFPEEEEGGCELRVKFSRSADAPAYQQGQNQLYNELNLGRREEYDVLDKRRGRDPEMGGKPRRKNPQEGLYNELQKDKMAEAYSEIGMKGERRRGKGHDGLYQGLSTATKDTYDALHMQALPPR

SEQ ID NO: 7740 - protein, 461 aa, Artificial Sequence
  source: /note="Description of Artificial Sequence: Synthetic Chimeric Antigen Receptor"
MALPVTALLLPLALLLHAARPQVQLQQPGAELVKPGASMKMSCKASGYTFPSSNIHWLKQTPGQGLEWIGVIYPGNGDTSYNQKFKDKATLTTDKSSSTAYMQLSSLTSEDSAIYFSCCARVYNWHFDVWGAGTTVTVSSGGGGSGGGGSGGGGSNIVLTQSPASLAVSLGQRATISCRASESVDGYGDIFMLWYQQKPGQPPKLLIYFASNLESGVPARFSGSGSRTDFTLTIDPVEADDAATYYCQQNNEDPYTFGGGTKLEIKRGLAVSTISSFFPPGYQIYIWAPLAGTCGVLLLSLVITLYCKRGRKKLLYIFKQPFMRPVQTTQEEDGCSCRFPEEEEGGCELRVKFSRSADAPAYQQGQNQLYNELNLGRREEYDVLDKRRGRDPEMGGKPRRKNPQEGLYNELQKDKMAEAYSEIGMKGERRRGKGHDGLYQGLSTATKDTYDALHMQALPPR

SEQ ID NO: 7741 - protein, 464 aa, Artificial Sequence
  source: /note="Description of Artificial Sequence: Synthetic Chimeric Antigen Receptor"
MALPVTALLLPLALLLHAARPQVQLQQPGAELVKPGASMKMSCKASGYTFPSSNIHWLKQTPGQGLEWIGVIYPGNGDTSYNQKFKDKATLTTDKSSSTAYMQLSSLTSEDSAIYFSCCARVYNWHFDVWGAGTTVTVSSGGGGSGGGGSGGGGSNIVLTQSPASLAVSLGQRATISCRASESVDGYGDIFMLWYQQKPGQPPKLLIYFASNLESGVPARFSGSGSRTDFTLTIDPVEADDAATYYCQQNNEDPYTFGGGTKLEIKRGLAVSTISSFFPPGYQIISFFLALTSTALLFLLFFLTLRFSVVKRGRKKLLYIFKQPFMRPVQTTQEEDGCSCRFPEEEEGGCELRVKFSRSADAPAYQQGQNQLYNELNLGRREEYDVLDKRRGRDPEMGGKPRRKNPQEGLYNELQKDKMAEAYSEIGMKGERRRGKGHDGLYQGLSTATKDTYDALHMQALPPR

SEQ ID NO: 7742 - protein, 490 aa, Artificial Sequence
  source: /note="Description of Artificial Sequence: Synthetic Chimeric Antigen Receptor"
MALPVTALLLPLALLLHAARPQVQLQQPGAELVKPGASMKMSCKASGYTFPSSNIHWLKQTPGQGLEWIGVIYPGNGDTSYNQKFKDKATLTTDKSSSTAYMQLSSLTSEDSAIYFSCCARVYNWHFDVWGAGTTVTVSSGGGGSGGGGSGGGGSNIVLTQSPASLAVSLGQRATISCRASESVDGYGDIFMLWYQQKPGQPPKLLIYFASNLESGVPARFSGSGSRTDFTLTIDPVEADDAATYYCQQNNEDPYTFGGGTKLEIKRTTTPAPRPPTPAPTIASQPLSLRPEACRPAAGGAVHTRGLDFACDIYIWAPLAGTCGVLLLSLVITLYCKRGRKKLLYIFKQPFMRPVQTTQEEDGCSCRFPEEEEGGCELRVKFSRSADAPAYQQGQNQLYNELNLGRREEYDVLDKRRGRDPEMGGKPRRKNPQEGLYNELQKDKMAEAYSEIGMKGERRRGKGHDGLYQGLSTATKDTYDALHMQALPPR

SEQ ID NO: 7743 - protein, 493 aa, Artificial Sequence
  source: /note="Description of Artificial Sequence: Synthetic Chimeric Antigen Receptor"
MALPVTALLLPLALLLHAARPQVQLQQPGAELVKPGASMKMSCKASGYTFPSSNIHWLKQTPGQGLEWIGVIYPGNGDTSYNQKFKDKATLTTDKSSSTAYMQLSSLTSEDSAIYFSCCARVYNWHFDVWGAGTTVTVSSGGGGSGGGGSGGGGSNIVLTQSPASLAVSLGQRATISCRASESVDGYGDIFMLWYQQKPGQPPKLLIYFASNLESGVPARFSGSGSRTDFTLTIDPVEADDAATYYCQQNNEDPYTFGGGTKLEIKRTTTPAPRPPTPAPTIASQPLSLRPEACRPAAGGAVHTRGLDFACDIISFFLALTSTALLFLLFFLTLRFSVVKRGRKKLLYIFKQPFMRPVQTTQEEDGCSCRFPEEEEGGCELRVKFSRSADAPAYQQGQNQLYNELNLGRREEYDVLDKRRGRDPEMGGKPRRKNPQEGLYNELQKDKMAEAYSEIGMKGERRRGKGHDGLYQGLSTATKDTYDALHMQALPPR

SEQ ID NO: 7744 - protein, 676 aa, Artificial Sequence
  source: /note="Description of Artificial Sequence: Synthetic Chimeric Antigen Receptor"
MALPVTALLLPLALLLHAARPQVQLQQPGAELVKPGASMKMSCKASGYTFPSSNIHWLKQTPGQGLEWIGVIYPGNGDTSYNQKFKDKATLTTDKSSSTAYMQLSSLTSEDSAIYFSCCARVYNWHFDVWGAGTTVTVSSGGGGSGGGGSGGGGSNIVLTQSPASLAVSLGQRATISCRASESVDGYGDIFMLWYQQKPGQPPKLLIYFASNLESGVPARFSGSGSRTDFTLTIDPVEADDAATYYCQQNNEDPYTFGGGTKLEIKREPKSPDKTHTCPPCPAPPVAGPSVFLFPPKPKDTLMIARTPEVTCVVVDVSHEDPEVKFNWYVDGVEVHNAKTKPREEQYNSTYRVVSVLTVLHQDWLNGKEYKCKVSNKALPAPIEKTISKAKGQPREPQVYTLPPSRDELTKNQVSLTCLVKGFYPSDIAVEWESNGQPENNYKTTPPVLDSDGSFFLYSKLTVDKSRWQQGNVFSCSVMHEALHNHYTQKSLSLSPGKIYIWAPLAGTCGVLLLSLVITLYCKRGRKKLLYIFKQPFMRPVQTTQEEDGCSCRFPEEEEGGCELRVKFSRSADAPAYQQGQNQLYNELNLGRREEYDVLDKRRGRDPEMGGKPRRKNPQEGLYNELQKDKMAEAYSEIGMKGERRRGKGHDGLYQGLSTATKDTYDALHMQALPPR

SEQ ID NO: 7745 - protein, 679 aa, Artificial Sequence
  source: /note="Description of Artificial Sequence: Synthetic Chimeric Antigen Receptor"
MALPVTALLLPLALLLHAARPQVQLQQPGAELVKPGASMKMSCKASGYTFPSSNIHWLKQTPGQGLEWIGVIYPGNGDTSYNQKFKDKATLTTDKSSSTAYMQLSSLTSEDSAIYFSCCARVYNWHFDVWGAGTTVTVSSGGGGSGGGGSGGGGSNIVLTQSPASLAVSLGQRATISCRASESVDGYGDIFMLWYQQKPGQPPKLLIYFASNLESGVPARFSGSGSRTDFTLTIDPVEADDAATYYCQQNNEDPYTFGGGTKLEIKREPKSPDKTHTCPPCPAPPVAGPSVFLFPPKPKDTLMIARTPEVTCVVVDVSHEDPEVKFNWYVDGVEVHNAKTKPREEQYNSTYRVVSVLTVLHQDWLNGKEYKCKVSNKALPAPIEKTISKAKGQPREPQVYTLPPSRDELTKNQVSLTCLVKGFYPSDIAVEWESNGQPENNYKTTPPVLDSDGSFFLYSKLTVDKSRWQQGNVFSCSVMHEALHNHYTQKSLSLSPGKIISFFLALTSTALLFLLFFLTLRFSVVKRGRKKLLYIFKQPFMRPVQTTQEEDGCSCRFPEEEEGGCELRVKFSRSADAPAYQQGQNQLYNELNLGRREEYDVLDKRRGRDPEMGGKPRRKNPQEGLYNELQKDKMAEAYSEIGMKGERRRGKGHDGLYQGLSTATKDTYDALHMQALPPR

SEQ ID NO: 7746 - protein, 456 aa, Artificial Sequence
  source: /note="Description of Artificial Sequence: Synthetic Chimeric Antigen Receptor"
MALPVTALLLPLALLLHAARPQVQLQQPGAELVKPGTSVKLSCKASGYTFTRYWMHWVKQRPGQGLEWIGMIHPSSGSTSYNEKVKNKATLTVDRSSTTAYMQLSSLTSEDSAVYYCARDGDYYYGTGDYWGQGTTLTVSSGGGGSGGGGSGGGGSQIVLSQSPAILSASPGEKVTMTCRASSSINYMHWYQQKPGSSPKPWIFATSNLASGVPSRFSGSGSGTSYSLTISRVEAEDAATYYCQQWRSDRALTFGAGTKLELGLAVSTISSFFPPGYQIYIWAPLAGTCGVLLLSLVITLYCKRGRKKLLYIFKQPFMRPVQTTQEEDGCSCRFPEEEEGGCELRVKFSRSADAPAYQQGQNQLYNELNLGRREEYDVLDKRRGRDPEMGGKPRRKNPQEGLYNELQKDKMAEAYSEIGMKGERRRGKGHDGLYQGLSTATKDTYDALHMQALPPR

SEQ ID NO: 7747 - protein, 459 aa, Artificial Sequence
  source: /note="Description of Artificial Sequence: Synthetic Chimeric Antigen Receptor"
MALPVTALLLPLALLLHAARPQVQLQQPGAELVKPGTSVKLSCKASGYTFTRYWMHWVKQRPGQGLEWIGMIHPSSGSTSYNEKVKNKATLTVDRSSTTAYMQLSSLTSEDSAVYYCARDGDYYYGTGDYWGQGTTLTVSSGGGGSGGGGSGGGGSQIVLSQSPAILSASPGEKVTMTCRASSSINYMHWYQQKPGSSPKPWIFATSNLASGVPSRFSGSGSGTSYSLTISRVEAEDAATYYCQQWRSDRALTFGAGTKLELGLAVSTISSFFPPGYQIISFFLALTSTALLFLLFFLTLRFSVVKRGRKKLLYIFKQPFMRPVQTTQEEDGCSCRFPEEEEGGCELRVKFSRSADAPAYQQGQNQLYNELNLGRREEYDVLDKRRGRDPEMGGKPRRKNPQEGLYNELQKDKMAEAYSEIGMKGERRRGKGHDGLYQGLSTATKDTYDALHMQALPPR

SEQ ID NO: 7748 - protein, 485 aa, Artificial Sequence
  source: /note="Description of Artificial Sequence: Synthetic Chimeric Antigen Receptor"
MALPVTALLLPLALLLHAARPQVQLQQPGAELVKPGTSVKLSCKASGYTFTRYWMHWVKQRPGQGLEWIGMIHPSSGSTSYNEKVKNKATLTVDRSSTTAYMQLSSLTSEDSAVYYCARDGDYYYGTGDYWGQGTTLTVSSGGGGSGGGGSGGGGSQIVLSQSPAILSASPGEKVTMTCRASSSINYMHWYQQKPGSSPKPWIFATSNLASGVPSRFSGSGSGTSYSLTISRVEAEDAATYYCQQWRSDRALTFGAGTKLELTTTPAPRPPTPAPTIASQPLSLRPEACRPAAGGAVHTRGLDFACDIYIWAPLAGTCGVLLLSLVITLYCKRGRKKLLYIFKQPFMRPVQTTQEEDGCSCRFPEEEEGGCELRVKFSRSADAPAYQQGQNQLYNELNLGRREEYDVLDKRRGRDPEMGGKPRRKNPQEGLYNELQKDKMAEAYSEIGMKGERRRGKGHDGLYQGLSTATKDTYDALHMQALPPR

SEQ ID NO: 7749 - protein, 488 aa, Artificial Sequence
  source: /note="Description of Artificial Sequence: Synthetic Chimeric Antigen Receptor"
MALPVTALLLPLALLLHAARPQVQLQQPGAELVKPGTSVKLSCKASGYTFTRYWMHWVKQRPGQGLEWIGMIHPSSGSTSYNEKVKNKATLTVDRSSTTAYMQLSSLTSEDSAVYYCARDGDYYYGTGDYWGQGTTLTVSSGGGGSGGGGSGGGGSQIVLSQSPAILSASPGEKVTMTCRASSSINYMHWYQQKPGSSPKPWIFATSNLASGVPSRFSGSGSGTSYSLTISRVEAEDAATYYCQQWRSDRALTFGAGTKLELTTTPAPRPPTPAPTIASQPLSLRPEACRPAAGGAVHTRGLDFACDIISFFLALTSTALLFLLFFLTLRFSVVKRGRKKLLYIFKQPFMRPVQTTQEEDGCSCRFPEEEEGGCELRVKFSRSADAPAYQQGQNQLYNELNLGRREEYDVLDKRRGRDPEMGGKPRRKNPQEGLYNELQKDKMAEAYSEIGMKGERRRGKGHDGLYQGLSTATKDTYDALHMQALPPR

SEQ ID NO: 7750 - protein, 671 aa, Artificial Sequence
  source: /note="Description of Artificial Sequence: Synthetic Chimeric Antigen Receptor"
MALPVTALLLPLALLLHAARPQVQLQQPGAELVKPGTSVKLSCKASGYTFTRYWMHWVKQRPGQGLEWIGMIHPSSGSTSYNEKVKNKATLTVDRSSTTAYMQLSSLTSEDSAVYYCARDGDYYYGTGDYWGQGTTLTVSSGGGGSGGGGSGGGGSQIVLSQSPAILSASPGEKVTMTCRASSSINYMHWYQQKPGSSPKPWIFATSNLASGVPSRFSGSGSGTSYSLTISRVEAEDAATYYCQQWRSDRALTFGAGTKLELEPKSPDKTHTCPPCPAPPVAGPSVFLFPPKPKDTLMIARTPEVTCVVVDVSHEDPEVKFNWYVDGVEVHNAKTKPREEQYNSTYRVVSVLTVLHQDWLNGKEYKCKVSNKALPAPIEKTISKAKGQPREPQVYTLPPSRDELTKNQVSLTCLVKGFYPSDIAVEWESNGQPENNYKTTPPVLDSDGSFFLYSKLTVDKSRWQQGNVFSCSVMHEALHNHYTQKSLSLSPGKIYIWAPLAGTCGVLLLSLVITLYCKRGRKKLLYIFKQPFMRPVQTTQEEDGCSCRFPEEEEGGCELRVKFSRSADAPAYQQGQNQLYNELNLGRREEYDVLDKRRGRDPEMGGKPRRKNPQEGLYNELQKDKMAEAYSEIGMKGERRRGKGHDGLYQGLSTATKDTYDALHMQALPPR

SEQ ID NO: 7751 - protein, 674 aa, Artificial Sequence
  source: /note="Description of Artificial Sequence: Synthetic Chimeric Antigen Receptor"
MALPVTALLLPLALLLHAARPQVQLQQPGAELVKPGTSVKLSCKASGYTFTRYWMHWVKQRPGQGLEWIGMIHPSSGSTSYNEKVKNKATLTVDRSSTTAYMQLSSLTSEDSAVYYCARDGDYYYGTGDYWGQGTTLTVSSGGGGSGGGGSGGGGSQIVLSQSPAILSASPGEKVTMTCRASSSINYMHWYQQKPGSSPKPWIFATSNLASGVPSRFSGSGSGTSYSLTISRVEAEDAATYYCQQWRSDRALTFGAGTKLELEPKSPDKTHTCPPCPAPPVAGPSVFLFPPKPKDTLMIARTPEVTCVVVDVSHEDPEVKFNWYVDGVEVHNAKTKPREEQYNSTYRVVSVLTVLHQDWLNGKEYKCKVSNKALPAPIEKTISKAKGQPREPQVYTLPPSRDELTKNQVSLTCLVKGFYPSDIAVEWESNGQPENNYKTTPPVLDSDGSFFLYSKLTVDKSRWQQGNVFSCSVMHEALHNHYTQKSLSLSPGKIISFFLALTSTALLFLLFFLTLRFSVVKRGRKKLLYIFKQPFMRPVQTTQEEDGCSCRFPEEEEGGCELRVKFSRSADAPAYQQGQNQLYNELNLGRREEYDVLDKRRGRDPEMGGKPRRKNPQEGLYNELQKDKMAEAYSEIGMKGERRRGKGHDGLYQGLSTATKDTYDALHMQALPPR

SEQ ID NO: 7752 - protein, 460 aa, Artificial Sequence
  source: /note="Description of Artificial Sequence: Synthetic Chimeric Antigen Receptor"
MALPVTALLLPLALLLHAARPDIQLQESGPGLVKPSQSLSLTCSVTGYSITSAYYWNWIRQFPGNKLEWMGYISYDGRNNYNPSLKNRISITRDTSKNQFFLKLNSVTTEDTATYYCAKEGDYDVGNYYAMDYWGQGTSVTVSSGGGGSGGGGSGGGGSENVLTQSPAIMSASPGEKVTMTCRASSNVISSYVHWYQQRSGASPKLWIYSTSNLASGVPARFSGSGSGTSYSLTISSVEAEDAATYYCQQYSGYPLTFGAGTKLELGLAVSTISSFFPPGYQIYIWAPLAGTCGVLLLSLVITLYCKRGRKKLLYIFKQPFMRPVQTTQEEDGCSCRFPEEEEGGCELRVKFSRSADAPAYQQGQNQLYNELNLGRREEYDVLDKRRGRDPEMGGKPRRKNPQEGLYNELQKDKMAEAYSEIGMKGERRRGKGHDGLYQGLSTATKDTYDALHMQALPPR

SEQ ID NO: 7753 - protein, 463 aa, Artificial Sequence
  source: /note="Description of Artificial Sequence: Synthetic Chimeric Antigen Receptor"
MALPVTALLLPLALLLHAARPDIQLQESGPGLVKPSQSLSLTCSVTGYSITSAYYWNWIRQFPGNKLEWMGYISYDGRNNYNPSLKNRISITRDTSKNQFFLKLNSVTTEDTATYYCAKEGDYDVGNYYAMDYWGQGTSVTVSSGGGGSGGGGSGGGGSENVLTQSPAIMSASPGEKVTMTCRASSNVISSYVHWYQQRSGASPKLWIYSTSNLASGVPARFSGSGSGTSYSLTISSVEAEDAATYYCQQYSGYPLTFGAGTKLELGLAVSTISSFFPPGYQIISFFLALTSTALLFLLFFLTLRFSVVKRGRKKLLYIFKQPFMRPVQTTQEEDGCSCRFPEEEEGGCELRVKFSRSADAPAYQQGQNQLYNELNLGRREEYDVLDKRRGRDPEMGGKPRRKNPQEGLYNELQKDKMAEAYSEIGMKGERRRGKGHDGLYQGLSTATKDTYDALHMQALPPR

SEQ ID NO: 7754 - protein, 489 aa, Artificial Sequence
  source: /note="Description of Artificial Sequence: Synthetic Chimeric Antigen Receptor"
MALPVTALLLPLALLLHAARPDIQLQESGPGLVKPSQSLSLTCSVTGYSITSAYYWNWIRQFPGNKLEWMGYISYDGRNNYNPSLKNRISITRDTSKNQFFLKLNSVTTEDTATYYCAKEGDYDVGNYYAMDYWGQGTSVTVSSGGGGSGGGGSGGGGSENVLTQSPAIMSASPGEKVTMTCRASSNVISSYVHWYQQRSGASPKLWIYSTSNLASGVPARFSGSGSGTSYSLTISSVEAEDAATYYCQQYSGYPLTFGAGTKLELTTTPAPRPPTPAPTIASQPLSLRPEACRPAAGGAVHTRGLDFACDIYIWAPLAGTCGVLLLSLVITLYCKRGRKKLLYIFKQPFMRPVQTTQEEDGCSCRFPEEEEGGCELRVKFSRSADAPAYQQGQNQLYNELNLGRREEYDVLDKRRGRDPEMGGKPRRKNPQEGLYNELQKDKMAEAYSEIGMKGERRRGKGHDGLYQGLSTATKDTYDALHMQALPPR

SEQ ID NO: 7755 - protein, 492 aa, Artificial Sequence
  source: /note="Description of Artificial Sequence: Synthetic Chimeric Antigen Receptor"
MALPVTALLLPLALLLHAARPDIQLQESGPGLVKPSQSLSLTCSVTGYSITSAYYWNWIRQFPGNKLEWMGYISYDGRNNYNPSLKNRISITRDTSKNQFFLKLNSVTTEDTATYYCAKEGDYDVGNYYAMDYWGQGTSVTVSSGGGGSGGGGSGGGGSENVLTQSPAIMSASPGEKVTMTCRASSNVISSYVHWYQQRSGASPKLWIYSTSNLASGVPARFSGSGSGTSYSLTISSVEAEDAATYYCQQYSGYPLTFGAGTKLELTTTPAPRPPTPAPTIASQPLSLRPEACRPAAGGAVHTRGLDFACDIISFFLALTSTALLFLLFFLTLRFSVVKRGRKKLLYIFKQPFMRPVQTTQEEDGCSCRFPEEEEGGCELRVKFSRSADAPAYQQGQNQLYNELNLGRREEYDVLDKRRGRDPEMGGKPRRKNPQEGLYNELQKDKMAEAYSEIGMKGERRRGKGHDGLYQGLSTATKDTYDALHMQALPPR

SEQ ID NO: 7756 - protein, 675 aa, Artificial Sequence
  source: /note="Description of Artificial Sequence: Synthetic Chimeric Antigen Receptor"
MALPVTALLLPLALLLHAARPDIQLQESGPGLVKPSQSLSLTCSVTGYSITSAYYWNWIRQFPGNKLEWMGYISYDGRNNYNPSLKNRISITRDTSKNQFFLKLNSVTTEDTATYYCAKEGDYDVGNYYAMDYWGQGTSVTVSSGGGGSGGGGSGGGGSENVLTQSPAIMSASPGEKVTMTCRASSNVISSYVHWYQQRSGASPKLWIYSTSNLASGVPARFSGSGSGTSYSLTISSVEAEDAATYYCQQYSGYPLTFGAGTKLELEPKSPDKTHTCPPCPAPPVAGPSVFLFPPKPKDTLMIARTPEVTCVVVDVSHEDPEVKFNWYVDGVEVHNAKTKPREEQYNSTYRVVSVLTVLHQDWLNGKEYKCKVSNKALPAPIEKTISKAKGQPREPQVYTLPPSRDELTKNQVSLTCLVKGFYPSDIAVEWESNGQPENNYKTTPPVLDSDGSFFLYSKLTVDKSRWQQGNVFSCSVMHEALHNHYTQKSLSLSPGKIYIWAPLAGTCGVLLLSLVITLYCKRGRKKLLYIFKQPFMRPVQTTQEEDGCSCRFPEEEEGGCELRVKFSRSADAPAYQQGQNQLYNELNLGRREEYDVLDKRRGRDPEMGGKPRRKNPQEGLYNELQKDKMAEAYSEIGMKGERRRGKGHDGLYQGLSTATKDTYDALHMQALPPR

SEQ ID NO: 7757 - protein, 678 aa, Artificial Sequence
  source: /note="Description of Artificial Sequence: Synthetic Chimeric Antigen Receptor"
MALPVTALLLPLALLLHAARPDIQLQESGPGLVKPSQSLSLTCSVTGYSITSAYYWNWIRQFPGNKLEWMGYISYDGRNNYNPSLKNRISITRDTSKNQFFLKLNSVTTEDTATYYCAKEGDYDVGNYYAMDYWGQGTSVTVSSGGGGSGGGGSGGGGSENVLTQSPAIMSASPGEKVTMTCRASSNVISSYVHWYQQRSGASPKLWIYSTSNLASGVPARFSGSGSGTSYSLTISSVEAEDAATYYCQQYSGYPLTFGAGTKLELEPKSPDKTHTCPPCPAPPVAGPSVFLFPPKPKDTLMIARTPEVTCVVVDVSHEDPEVKFNWYVDGVEVHNAKTKPREEQYNSTYRVVSVLTVLHQDWLNGKEYKCKVSNKALPAPIEKTISKAKGQPREPQVYTLPPSRDELTKNQVSLTCLVKGFYPSDIAVEWESNGQPENNYKTTPPVLDSDGSFFLYSKLTVDKSRWQQGNVFSCSVMHEALHNHYTQKSLSLSPGKIISFFLALTSTALLFLLFFLTLRFSVVKRGRKKLLYIFKQPFMRPVQTTQEEDGCSCRFPEEEEGGCELRVKFSRSADAPAYQQGQNQLYNELNLGRREEYDVLDKRRGRDPEMGGKPRRKNPQEGLYNELQKDKMAEAYSEIGMKGERRRGKGHDGLYQGLSTATKDTYDALHMQALPPR

SEQ ID NO: 7758 - protein, 491 aa, Artificial Sequence
  source: /note="Description of Artificial Sequence: Synthetic Chimeric Antigen Receptor"
MALPVTALLLPLALLLHAARPEVQLQQSGAEVKKPGSSVKVSCKASGGTFSSYAISWVRQAPGQGLEWMGGIIPIFGTANYAQKFQGRVTITADESTSTAYMELSSLRSEDTAVYYCARDLEMATIMGGYWGQGTLVTVSSGGGGSGGGGSGGGGSQSALTQPASVSGSPGQSITISCTGTSSDVGGYNYVSWYQQHPGKAPKLMIYDVSNRPSGVSNRFSGSKSGNTASLTISGLQAEDEADYYCSSYTSSSTLDVVFGGGTKLTVLTTTPAPRPPTPAPTIASQPLSLRPEACRPAAGGAVHTRGLDFACDIYIWAPLAGTCGVLLLSLVITLYCKRGRKKLLYIFKQPFMRPVQTTQEEDGCSCRFPEEEEGGCELRVKFSRSADAPAYKQGQNQLYNELNLGRREEYDVLDKRRGRDPEMGGKPRRKNPQEGLYNELQKDKMAEAYSEIGMKGERRRGKGHDGLYQGLSTATKDTYDALHMQALPPR

SEQ ID NO: 7759 - protein, 489 aa, Artificial Sequence
  source: /note="Description of Artificial Sequence: Synthetic Chimeric Antigen Receptor"
MALPVTALLLPLALLLHAARPEVQLVESGGGVVQPGGSLRLSCAASGFTFDDYAMHWVRQAPGKGLEWVSLISGDGGSTYYADSVKGRFTISRDNSKNTLYLQMNSLRVEDTAVYYCARVFDSYYMDVWGKGTTVTVSSGGGGSGGGGSGSGGSEIVLTQSPLSLPVTPGQPASISCRSSQSLVYTDGNTYLNWFQQRPGQSPRRLIYKVSNRDSGVPDRFSGSGSDTDFTLKISRVEAEDVGIYYCMQGTHWSFTFGQGTRLEIKTTTPAPRPPTPAPTIASQPLSLRPEACRPAAGGAVHTRGLDFACDIYIWAPLAGTCGVLLLSLVITLYCKRGRKKLLYIFKQPFMRPVQTTQEEDGCSCRFPEEEEGGCELRVKFSRSADAPAYKQGQNQLYNELNLGRREEYDVLDKRRGRDPEMGGKPRRKNPQEGLYNELQKDKMAEAYSEIGMKGERRRGKGHDGLYQGLSTATKDTYDALHMQALPPR

SEQ ID NO: 7760 - protein, 491 aa, Artificial Sequence
  source: /note="Description of Artificial Sequence: Synthetic Chimeric Antigen Receptor"
MALPVTALLLPLALLLHAARPQVQLQESGPGLVKPSETLSLTCTVSGGSISSSSYYWGWIRQPPGKGLEWIGSIYYSGSTYYNPSLKSRVSISVDTSKNQFSLKLKYVTAADTAVYYCATPGTYYDFLSGYYPFYWGQGTLVTVSSGGGGSGGGGSGGGGSDIVMTQSPSSLSASVGDRVTITCRASQGISSYLAWYQQKPGKAPKLLIYAASTLQSGVPSRFSGSGSGTDFTLTISSLQPEDFATYYCQQLNSYPYTFGQGTKLEIKTTTPAPRPPTPAPTIASQPLSLRPEACRPAAGGAVHTRGLDFACDIYIWAPLAGTCGVLLLSLVITLYCKRGRKKLLYIFKQPFMRPVQTTQEEDGCSCRFPEEEEGGCELRVKFSRSADAPAYKQGQNQLYNELNLGRREEYDVLDKRRGRDPEMGGKPRRKNPQEGLYNELQKDKMAEAYSEIGMKGERRRGKGHDGLYQGLSTATKDTYDALHMQALPPR

SEQ ID NO: 7761 - protein, 483 aa, Artificial Sequence
  source: /note="Description of Artificial Sequence: Synthetic Chimeric Antigen Receptor"
MALPVTALLLPLALLLHAARPQVQLVESGGGLVQPGGSLRLSCAASGFTFSSYWMSWVRQAPGKGLEWVANINEDGSAKFYVDSVKGRFTISRDNAKNSLYLQMNSLRAEDTAVYFCARDLRSGRYWGQGTLVTVSSGGGGSGGGGSGGGGSEIVLTQSPGTLSLSPGGRATLSCRASQSISGSFLAWYQQKPGQAPRLLIYGASSRATGIPDRFSGSGSGTDFTLTISRLEPEDFAVYYCQQYGSSPPTFGLGTKLEIKTTTPAPRPPTPAPTIASQPLSLRPEACRPAAGGAVHTRGLDFACDIYIWAPLAGTCGVLLLSLVITLYCKRGRKKLLYIFKQPFMRPVQTTQEEDGCSCRFPEEEEGGCELRVKFSRSADAPAYKQGQNQLYNELNLGRREEYDVLDKRRGRDPEMGGKPRRKNPQEGLYNELQKDKMAEAYSEIGMKGERRRGKGHDGLYQGLSTATKDTYDALHMQALPPR

SEQ ID NO: 7762 - protein, 489 aa, Artificial Sequence
  source: /note="Description of Artificial Sequence: Synthetic Chimeric Antigen Receptor"
MALPVTALLLPLALLLHAARPEVQLQQSGPGLVRPSETLSLTCTVSGGPVRSGSHYWNWIRQPPGRGLEWIGYIYYSGSTNYNPSLENRVTISIDTSNNHFSLKLSSVTAADTALYFCARGTATFDWNFPFDSWGQGTLVTVSSGGGGSGGGGSGSGGSDIQMTQSPSSLSASIGDRVTITCRASQSISSYLNWYQQKPGKAPKLLIYAASSLQSGVPSRFSGSGSGTDFTLTISSLQPEDFATYYCQQSYSTPWTFGQGTKLEIKTTTPAPRPPTPAPTIASQPLSLRPEACRPAAGGAVHTRGLDFACDIYIWAPLAGTCGVLLLSLVITLYCKRGRKKLLYIFKQPFMRPVQTTQEEDGCSCRFPEEEEGGCELRVKFSRSADAPAYKQGQNQLYNELNLGRREEYDVLDKRRGRDPEMGGKPRRKNPQEGLYNELQKDKMAEAYSEIGMKGERRRGKGHDGLYQGLSTATKDTYDALHMQALPPR

SEQ ID NO: 7763 - protein, 493 aa, Artificial Sequence
  source: /note="Description of Artificial Sequence: Synthetic Chimeric Antigen Receptor"
MALPVTALLLPLALLLHAARPQVQLQESGAGLLKPSETLSLTCAVYGGSFSGYYWSWIRQPPGKGLEWVGEINHSGSTNYNPSLKSRVTISVDTSKNQFSLKLSSVTAADTAVYYCARGSGLVVYAIRVGSGWFDYWGQGTLVTVSSGGGGSGGGDSGGGGSDIQMTQSPSSLSASVGDRVTITCRASQSISSYLNWYQQKPGKAPKLLMYAASSLQSGVPSRFSGSGSGTDFTLTISSLQPEDFATYYCQQSYSTPPWTFGQGTKVDIKTTTPAPRPPTPAPTIASQPLSLRPEACRPAAGGAVHTRGLDFACDIYIWAPLAGTCGVLLLSLVITLYCKRGRKKLLYIFKQPFMRPVQTTQEEDGCSCRFPEEEEGGCELRVKFSRSADAPAYKQGQNQLYNELNLGRREEYDVLDKRRGRDPEMGGKPRRKNPQEGLYNELQKDKMAEAYSEIGMKGERRRGKGHDGLYQGLSTATKDTYDALHMQALPPR

SEQ ID NO: 7764 - protein, 499 aa, Artificial Sequence
  source: /note="Description of Artificial Sequence: Synthetic Chimeric Antigen Receptor"
MALPVTALLLPLALLLHAARPEVQLVESGGGLVKPGGSLRLSCAASGFTFSSYSMNWVRQAPGKGLEWVSSISSSSSYIYYADSVKGRFTISRDNAKNSLYLQMNSLRAEDTAVYYCARDPSSSGSYYMEDSYYYGMDVWGQGTTVTVSSGGGGSGGGGSGGGGSNFMLTQPHSVSESPGKTVTISCTGSSGSIASNYVQWYQQRPGSAPTTVIYEDNQRPSGVPDRFSGSIDSSSNSASLTISGLKTEDEADYYCQSYDSSNQVVFGGGTKLTVLTTTPAPRPPTPAPTIASQPLSLRPEACRPAAGGAVHTRGLDFACDIYIWAPLAGTCGVLLLSLVITLYCKRGRKKLLYIFKQPFMRPVQTTQEEDGCSCRFPEEEEGGCELRVKFSRSADAPAYKQGQNQLYNELNLGRREEYDVLDKRRGRDPEMGGKPRRKNPQEGLYNELQKDKMAEAYSEIGMKGERRRGKGHDGLYQGLSTATKDTYDALHMQALPPR

SEQ ID NO: 7765 - protein, 483 aa, Artificial Sequence
  source: /note="Description of Artificial Sequence: Synthetic Chimeric Antigen Receptor"
MALPVTALLLPLALLLHAARPQVNLRESGGGLVQPGGSLRLSCAASGFTFSSYEMNWVRQAPGKGLEWVSYISSSGSTIYYADSVKGRFTISRDNAKNSLYLQMNSLRAEDTAVYYCAREALGSSWEWGQGTTVTVSSGGGGSGGGGSGGGGSDIQMTQSPSSLSASVGDRVTITCQASQDISNYLNWYQQKPGKAPKLLIYDASNLETGVPSRFSGSGSGTDFTFTISSLQPEDIATYYCQQYDNLPLTFGGGTKLEIKTTTPAPRPPTPAPTIASQPLSLRPEACRPAAGGAVHTRGLDFACDIYIWAPLAGTCGVLLLSLVITLYCKRGRKKLLYIFKQPFMRPVQTTQEEDGCSCRFPEEEEGGCELRVKFSRSADAPAYKQGQNQLYNELNLGRREEYDVLDKRRGRDPEMGGKPRRKNPQEGLYNELQKDKMAEAYSEIGMKGERRRGKGHDGLYQGLSTATKDTYDALHMQALPPR

SEQ ID NO: 7766 - protein, 490 aa, Artificial Sequence
  source: /note="Description of Artificial Sequence: Synthetic Chimeric Antigen Receptor"
MALPVTALLLPLALLLHAARPQVQLVQSGAEVKEPGASVKVSCKAPANTFSDHVMHWVRQAPGQRFEWMGYIHAANGGTHYSQKFQDRVTITRDTSANTVYMDLSSLRSEDTAVYYCARGGYNSDAFDIWGQGTMVTVSSGGGGSGGGGSGGGGSGGGGSDIVMTQSPSSVSASVGDRVTITCRASQDISSWLAWYQQKPGKAPKLLIYAASSLQSGVPSRFNGSGSGTDFTLTISSLQPEDFATYYCQQSYSTPLTFGGGTKVEIKTTTPAPRPPTPAPTIASQPLSLRPEACRPAAGGAVHTRGLDFACDIYIWAPLAGTCGVLLLSLVITLYCKRGRKKLLYIFKQPFMRPVQTTQEEDGCSCRFPEEEEGGCELRVKFSRSADAPAYKQGQNQLYNELNLGRREEYDVLDKRRGRDPEMGGKPRRKNPQEGLYNELQKDKMAEAYSEIGMKGERRRGKGHDGLYQGLSTATKDTYDALHMQALPPR

SEQ ID NO: 7767 - protein, 492 aa, Artificial Sequence
  source: /note="Description of Artificial Sequence: Synthetic Chimeric Antigen Receptor"
MALPVTALLLPLALLLHAARPQVQLVQSGGGLVQPGGSLRLSCAASGFTFSSYSMNWVRQAPGKGLEWVSYISSSSSTIYYADSVKGRFTISRDNAKNSLYLQMNSLRAEDTAVYYCARDLSVRAIDAFDIWGQGTMVTVSSGGGGSGGGGSGGGGSGGGGSDIVLTQSPSSLSASVGDRVTITCQASQDISNYLNWYQQKPGKAPKLLIYDASNLETGVPSRFSGSGSGTDFTFTISSLQPEDFATYYCQQAYSTPFTFGPGTKVEIKTTTPAPRPPTPAPTIASQPLSLRPEACRPAAGGAVHTRGLDFACDIYIWAPLAGTCGVLLLSLVITLYCKRGRKKLLYIFKQPFMRPVQTTQEEDGCSCRFPEEEEGGCELRVKFSRSADAPAYKQGQNQLYNELNLGRREEYDVLDKRRGRDPEMGGKPRRKNPQEGLYNELQKDKMAEAYSEIGMKGERRRGKGHDGLYQGLSTATKDTYDALHMQALPPR

SEQ ID NO: 7768 - protein, 490 aa, Artificial Sequence
  source: /note="Description of Artificial Sequence: Synthetic Chimeric Antigen Receptor"
MALPVTALLLPLALLLHAARPEVQLVQSGGGVVRSGRSLRLSCAASGFTFNSYGLHWVRQAPGKGLEWVALIEYDGSNKYYGDSVKGRFTISRDKSKSTLYLQMDNLRAEDTAVYYCAREGNEDLAFDIWGQGTLVTVSSGGGGSGGGGSGGGGSGGGGSEIVLTQSPSSLSASVGDRVTITCQASQFIKKNLNWYQHKPGKAPKLLIYDASSLQTGVPSRFSGNRSGTTFSFTISSLQPEDVATYYCQQHDNLPLTFGGGTKVEIKTTTPAPRPPTPAPTIASQPLSLRPEACRPAAGGAVHTRGLDFACDIYIWAPLAGTCGVLLLSLVITLYCKRGRKKLLYIFKQPFMRPVQTTQEEDGCSCRFPEEEEGGCELRVKFSRSADAPAYKQGQNQLYNELNLGRREEYDVLDKRRGRDPEMGGKPRRKNPQEGLYNELQKDKMAEAYSEIGMKGERRRGKGHDGLYQGLSTATKDTYDALHMQALPPR

SEQ ID NO: 7769 - protein, 499 aa, Artificial Sequence
  source: /note="Description of Artificial Sequence: Synthetic Chimeric Antigen Receptor"
MALPVTALLLPLALLLHAARPQVQLVESGGGLVQPGGSLRLSCAASGFNVSSNYMTWVRQAPGKGLEWVSVIYSGGATYYGDSVKGRFTVSRDNSKNTVYLQMNRLTAEDTAVYYCARDRLYCGNNCYLYYYYGMDVWGQGTLVTVSSGGGGSGGGGSGGGGSGGGGSDIQVTQSPSSLSASVGDRVTITCRASQSISSYLNWYQQKPGKAPKLLIYAASSLQSGVPSRFSGSGSGTDFTLTISSLQPEDFATYYCQQSYSTPPLTFGQGTKVEIKTTTPAPRPPTPAPTIASQPLSLRPEACRPAAGGAVHTRGLDFACDIYIWAPLAGTCGVLLLSLVITLYCKRGRKKLLYIFKQPFMRPVQTTQEEDGCSCRFPEEEEGGCELRVKFSRSADAPAYKQGQNQLYNELNLGRREEYDVLDKRRGRDPEMGGKPRRKNPQEGLYNELQKDKMAEAYSEIGMKGERRRGKGHDGLYQGLSTATKDTYDALHMQALPPR

SEQ ID NO: 7770 - protein, 491 aa, Artificial Sequence
  source: /note="Description of Artificial Sequence: Synthetic Chimeric Antigen Receptor"
MALPVTALLLPLALLLHAARPQVQLVQSGAEVKKSGASVKVSCKASGYPFTGYYIQWVRQAPGQGLEWMGWIDPNSGNTGYAQKFQGRVTMTRNTSISTAYMELSSLRSEDTAVYYCASDSYGYYYGMDVWGQGTLVTVSSGGGGSGGGGSGGGGSGGGGSDIQMTQSPSSLSASVGDRVTFTCRASQGISSALAWYQQKPGKPPKLLIYDASSLESGVPSRFSGSGSGTDFTLTISSLQPEDFATYYCQQFNNYPLTFGGGTKVEIKTTTPAPRPPTPAPTIASQPLSLRPEACRPAAGGAVHTRGLDFACDIYIWAPLAGTCGVLLLSLVITLYCKRGRKKLLYIFKQPFMRPVQTTQEEDGCSCRFPEEEEGGCELRVKFSRSADAPAYKQGQNQLYNELNLGRREEYDVLDKRRGRDPEMGGKPRRKNPQEGLYNELQKDKMAEAYSEIGMKGERRRGKGHDGLYQGLSTATKDTYDALHMQALPPR

SEQ ID NO: 7771 - protein, 489 aa, Artificial Sequence
  source: /note="Description of Artificial Sequence: Synthetic Chimeric Antigen Receptor"
MALPVTALLLPLALLLHAARPEVQLVESGGGLVQPGGSLRLSCAASGFTFSSYEMNWVRQAPGKGLEWVSYISSSGSTIYYADSVKGRFTISRDNAKNSLYLQMNSLRAEDTAVYYCARDPYSSSWHDAFDIWGQGTMVTVSSGGGGSGGGGSGGGGSEIVLTQSPGTLSLSPGERATLSCRASQSVSSSYLAWYQQKPGQAPRLLIYGASSRATGIPDRFSGSGSGTDFTLTISRLEPEDFAVYYCQQYGSSPLTFGGGTKVDIKTTTPAPRPPTPAPTIASQPLSLRPEACRPAAGGAVHTRGLDFACDIYIWAPLAGTCGVLLLSLVITLYCKRGRKKLLYIFKQPFMRPVQTTQEEDGCSCRFPEEEEGGCELRVKFSRSADAPAYKQGQNQLYNELNLGRREEYDVLDKRRGRDPEMGGKPRRKNPQEGLYNELQKDKMAEAYSEIGMKGERRRGKGHDGLYQGLSTATKDTYDALHMQALPPR

SEQ ID NO: 7772 - protein, 535 aa, Artificial Sequence
  source: /note="Description of Artificial Sequence: Synthetic Chimeric Antigen Receptor"
MALPVTALLLPLALLLHAARPGSEIQLQQSGAELVKPGASVKLSCTGSGFNIEDYYIHWVKQRTEQGLEWIGRIDPENDETKYGPIFQGRATITADTSSNTVYLQLSSLTSEDTAVYYCAFRGGVYWGPGTTLTVSSGGGGSGGGGSGGGGSHMDVVMTQSPLTLSVAIGQSASISCKSSQSLLDSDGKTYLNWLLQRPGQSPKRLISLVSKLDSGVPDRFTGSGSGTDFTLRISRVEAEDLGIYYCWQGTHFPGTFGGGTKLEIKASTTTPAPRPPTPAPTIASQPLSLRPEACRPAAGGAVHTRGLDFACDFWVLVVVGGVLACYSLLVTVAFIIFWVRSKRSRLLHSDYMNMTPRRPGPTRKHYQPYAPPRDFAAYRSKRGRKKLLYIFKQPFMRPVQTTQEEDGCSCRFPEEEEGGCELRVKFSRSADAPAYKQGQNQLYNELNLGRREEYDVLDKRRGRDPEMGGKPRRKNPQEGLYNELQKDKMAEAYSEIGMKGERRRGKGHDGLYQGLSTATKDTYDALHMQALPPR

SEQ ID NO: 7773 - protein, 482 aa, Artificial Sequence
  source: /note="Description of Artificial Sequence: Synthetic Chimeric Antigen Receptor"
MALPVTALLLPLALLLHAARPEVQLLESGGGLVQPGGSLRLSCAASGFTFSSYAMNWVRQAPGKGLEWVSAISDSGGSRWYADSVKGRFTISRDNSKNTLYLQMNSLRAEDTAVYYCTRYWPMDIWGQGTLVTVSSGGGGSGGGGSGGGGSEIVLTQSPGTLSLSPGERATLSCRASVRVSSTYLAWYQQKPGQAPRLLMYDASIRATGIPDRFSGSGSGTDFTLTISRLEPEDFAVYYCQQYMKWPLTFGQGTKVEIKTTTPAPRPPTPAPTIASQPLSLRPEACRPAAGGAVHTRGLDFACDIYIWAPLAGTCGVLLLSLVITLYCKRGRKKLLYIFKQPFMRPVQTTQEEDGCSCRFPEEEEGGCELRVKFSRSADAPAYQQGQNQLYNELNLGRREEYDVLDKRRGRDPEMGGKPRRKNPQEGLYNELQKDKMAEAYSEIGMKGERRRGKGHDGLYQGLSTATKDTYDALHMQALPPR

SEQ ID NO: 7774 - protein, 668 aa, Artificial Sequence
  source: /note="Description of Artificial Sequence: Synthetic Chimeric Antigen Receptor"
MALPVTALLLPLALLLHAARPEVQLLESGGGLVQPGGSLRLSCAASGFTFSSYAMNWVRQAPGKGLEWVSAISDSGGSRWYADSVKGRFTISRDNSKNTLYLQMNSLRAEDTAVYYCTRYWPMDIWGQGTLVTVSSGGGGSGGGGSGGGGSEIVLTQSPGTLSLSPGERATLSCRASVRVSSTYLAWYQQKPGQAPRLLMYDASIRATGIPDRFSGSGSGTDFTLTISRLEPEDFAVYYCQQYMKWPLTFGQGTKVEIKEPKSPDKTHTCPPCPAPPVAGPSVFLFPPKPKDTLMIARTPEVTCVVVDVSHEDPEVKFNWYVDGVEVHNAKTKPREEQYNSTYRVVSVLTVLHQDWLNGKEYKCKVSNKALPAPIEKTISKAKGQPREPQVYTLPPSRDELTKNQVSLTCLVKGFYPSDIAVEWESNGQPENNYKTTPPVLDSDGSFFLYSKLTVDKSRWQQGNVFSCSVMHEALHNHYTQKSLSLSPGKIYIWAPLAGTCGVLLLSLVITLYCKRGRKKLLYIFKQPFMRPVQTTQEEDGCSCRFPEEEEGGCELRVKFSRSADAPAYQQGQNQLYNELNLGRREEYDVLDKRRGRDPEMGGKPRRKNPQEGLYNELQKDKMAEAYSEIGMKGERRRGKGHDGLYQGLSTATKDTYDALHMQALPPR

SEQ ID NO: 7775 - protein, 487 aa, Artificial Sequence
  source: /note="Description of Artificial Sequence: Synthetic Chimeric Antigen Receptor"
MALPVTALLLPLALLLHAARPQVQLQQSGAELARPGASVKLSCKASGYTFTSYWMQWVKQRPGQGLEWIGAIYPGDGDTRYTQKFKGKATLTADKSSSTAYMQLSSLASEDSAVYYCARGKVYYGSNPFAYWGQGTLVTVSAGGGGSGGGGSGGGGSDIQMTQSSSYLSVSLGGRVTITCKASDHINNWLAWYQQKPGNAPRLLISGATSLETGVPSRFSGSGSGKDYTLSITSLQTEDVATYYCQQYWSTPWTFGGGTKLEIKTTTPAPRPPTPAPTIASQPLSLRPEACRPAAGGAVHTRGLDFACDIYIWAPLAGTCGVLLLSLVITLYCKRGRKKLLYIFKQPFMRPVQTTQEEDGCSCRFPEEEEGGCELRVKFSRSADAPAYQQGQNQLYNELNLGRREEYDVLDKRRGRDPEMGGKPRRKNPQEGLYNELQKDKMAEAYSEIGMKGERRRGKGHDGLYQGLSTATKDTYDALHMQALPPR

SEQ ID NO: 7776 - protein, 433 aa, Artificial Sequence
  source: /note="Description of Artificial Sequence: Synthetic Chimeric Antigen Receptor"
MALPVTALLLPLALLLHAARPQVQLQQSGPELVKPGASVKISCKASGYAFSSSWMNWVKQRPGQGLEWIGRIYPGDGDTKYNGKFKGKATLTADKSSSTAYMQLSSLTSVDSAVYFCARSTMIATGAMDYWGQGTSVTVSSGGGGSGGGGSGGGGSETTVTQSPASLSMAIGEKVTIRCITSTDIDDDMNWYQQKPGEPPKLLISEGNTLRPGVPSRFSSSGYGTDFVFTIENMLSEDVADYYCLQSDNLPLTFGGGTKLEIKGLAVSTISSFFPPGYQKRGRKKLLYIFKQPFMRPVQTTQEEDGCSCRFPEEEEGGCELRVKFSRSADAPAYQQGQNQLYNELNLGRREEYDVLDKRRGRDPEMGGKPRRKNPQEGLYNELQKDKMAEAYSEIGMKGERRRGKGHDGLYQGLSTATKDTYDALHMQALPPR

SEQ ID NO: 7777 - protein, 434 aa, Artificial Sequence
  source: /note="Description of Artificial Sequence: Synthetic Chimeric Antigen Receptor"
MALPVTALLLPLALLLHAARPQVQLQQSGPELVKPGASVKISCKASGYAFSSSWMNWVKQRPGQGLEWIGRIYPGDGDTKYNGKFKGKATLTADKSSSTAYMQLSSLTSVDSAVYFCARSTMIATGAMDYWGQGTSVTVSSGGGGSGGGGSGGGGSDIVMTQSHKFMSTSVGDRVSITCKASQDVSTAVAWYQQKPGQSPKLLIYSASYRYTGVPDRFTGSGSGTDFTFTISSVQAEDLAVYYCQQHYSTPPYTFGGGTKLEIKGLAVSTISSFFPPGYQKRGRKKLLYIFKQPFMRPVQTTQEEDGCSCRFPEEEEGGCELRVKFSRSADAPAYQQGQNQLYNELNLGRREEYDVLDKRRGRDPEMGGKPRRKNPQEGLYNELQKDKMAEAYSEIGMKGERRRGKGHDGLYQGLSTATKDTYDALHMQALPPR

SEQ ID NO: 7778 - protein, 434 aa, Artificial Sequence
  source: /note="Description of Artificial Sequence: Synthetic Chimeric Antigen Receptor"
MALPVTALLLPLALLLHAARPQVQLQQSGAELARPGASVKLSCKASGYTFTSYWMQWVKQRPGQGLEWIGAIYPGDGDTRYTQKFKGKATLTADKSSSTAYMQLSSLASEDSAVYYCARGKVYYGSNPFAYWGQGTLVTVSAGGGGSGGGGSGGGGSDIQMTQSSSYLSVSLGGRVTITCKASDHINNWLAWYQQKPGNAPRLLISGATSLETGVPSRFSGSGSGKDYTLSITSLQTEDVATYYCQQYWSTPWTFGGGTKLEIKGLAVSTISSFFPPGYQKRGRKKLLYIFKQPFMRPVQTTQEEDGCSCRFPEEEEGGCELRVKFSRSADAPAYQQGQNQLYNELNLGRREEYDVLDKRRGRDPEMGGKPRRKNPQEGLYNELQKDKMAEAYSEIGMKGERRRGKGHDGLYQGLSTATKDTYDALHMQALPPR

SEQ ID NO: 7779 - protein, 649 aa, Artificial Sequence
  source: /note="Description of Artificial Sequence: Synthetic Chimeric Antigen Receptor"
MALPVTALLLPLALLLHAARPQVQLQQSGAELARPGASVKLSCKASGYTFTSYWMQWVKQRPGQGLEWIGAIYPGDGDTRYTQKFKGKATLTADKSSSTAYMQLSSLASEDSAVYYCARGKVYYGSNPFAYWGQGTLVTVSAGGGGSGGGGSGGGGSDIQMTQSSSYLSVSLGGRVTITCKASDHINNWLAWYQQKPGNAPRLLISGATSLETGVPSRFSGSGSGKDYTLSITSLQTEDVATYYCQQYWSTPWTFGGGTKLEIKEPKSPDKTHTCPPCPAPPVAGPSVFLFPPKPKDTLMIARTPEVTCVVVDVSHEDPEVKFNWYVDGVEVHNAKTKPREEQYNSTYRVVSVLTVLHQDWLNGKEYKCKVSNKALPAPIEKTISKAKGQPREPQVYTLPPSRDELTKNQVSLTCLVKGFYPSDIAVEWESNGQPENNYKTTPPVLDSDGSFFLYSKLTVDKSRWQQGNVFSCSVMHEALHNHYTQKSLSLSPGKKRGRKKLLYIFKQPFMRPVQTTQEEDGCSCRFPEEEEGGCELRVKFSRSADAPAYQQGQNQLYNELNLGRREEYDVLDKRRGRDPEMGGKPRRKNPQEGLYNELQKDKMAEAYSEIGMKGERRRGKGHDGLYQGLSTATKDTYDALHMQALPPR

SEQ ID NO: 7780 - protein, 432 aa, Artificial Sequence
  source: /note="Description of Artificial Sequence: Synthetic Chimeric Antigen Receptor"
MALPVTALLLPLALLLHAARPEVKLLESGGGLVQPGGSLKLSCAASGFDFSRYWMSWVRQAPGKGLEWIGEINPDSSTINYTPSLKDKFIISRDNAKNTLYLQMSKVRSEDTALYYCARPDGNYWYFDVWGAGTTVTVSSGGGGSGGGGSGGGGSDIVMTQSHKFMSTSVGDRVSITCKASQDVGIAVAWYQQKPGQSPKLLIYWASTRHTGVPDRFTGSGSGTDFTLTISNVQSEDLADYFCQQYSSYPYTFGGGTKLEIKGLAVSTISSFFPPGYQKRGRKKLLYIFKQPFMRPVQTTQEEDGCSCRFPEEEEGGCELRVKFSRSADAPAYQQGQNQLYNELNLGRREEYDVLDKRRGRDPEMGGKPRRKNPQEGLYNELQKDKMAEAYSEIGMKGERRRGKGHDGLYQGLSTATKDTYDALHMQALPPR

SEQ ID NO: 7781 - protein, 485 aa, Artificial Sequence
  source: /note="Description of Artificial Sequence: Synthetic Chimeric Antigen Receptor"
MALPVTALLLPLALLLHAARPEVKLLESGGGLVQPGGSLKLSCAASGFDFSRYWMSWVRQAPGKGLEWIGEINPDSSTINYTPSLKDKFIISRDNAKNTLYLQMSKVRSEDTALYYCARPDGNYWYFDVWGAGTTVTVSSGGGGSGGGGSGGGGSDIVMTQSHKFMSTSVGDRVSITCKASQDVGIAVAWYQQKPGQSPKLLIYWASTRHTGVPDRFTGSGSGTDFTLTISNVQSEDLADYFCQQYSSYPYTFGGGTKLEIKTTTPAPRPPTPAPTIASQPLSLRPEACRPAAGGAVHTRGLDFACDIYIWAPLAGTCGVLLLSLVITLYCKRGRKKLLYIFKQPFMRPVQTTQEEDGCSCRFPEEEEGGCELRVKFSRSADAPAYQQGQNQLYNELNLGRREEYDVLDKRRGRDPEMGGKPRRKNPQEGLYNELQKDKMAEAYSEIGMKGERRRGKGHDGLYQGLSTATKDTYDALHMQALPPR

SEQ ID NO: 7782 - protein, 647 aa, Artificial Sequence
  source: /note="Description of Artificial Sequence: Synthetic Chimeric Antigen Receptor"
MALPVTALLLPLALLLHAARPEVKLLESGGGLVQPGGSLKLSCAASGFDFSRYWMSWVRQAPGKGLEWIGEINPDSSTINYTPSLKDKFIISRDNAKNTLYLQMSKVRSEDTALYYCARPDGNYWYFDVWGAGTTVTVSSGGGGSGGGGSGGGGSDIVMTQSHKFMSTSVGDRVSITCKASQDVGIAVAWYQQKPGQSPKLLIYWASTRHTGVPDRFTGSGSGTDFTLTISNVQSEDLADYFCQQYSSYPYTFGGGTKLEIKEPKSPDKTHTCPPCPAPPVAGPSVFLFPPKPKDTLMIARTPEVTCVVVDVSHEDPEVKFNWYVDGVEVHNAKTKPREEQYNSTYRVVSVLTVLHQDWLNGKEYKCKVSNKALPAPIEKTISKAKGQPREPQVYTLPPSRDELTKNQVSLTCLVKGFYPSDIAVEWESNGQPENNYKTTPPVLDSDGSFFLYSKLTVDKSRWQQGNVFSCSVMHEALHNHYTQKSLSLSPGKKRGRKKLLYIFKQPFMRPVQTTQEEDGCSCRFPEEEEGGCELRVKFSRSADAPAYQQGQNQLYNELNLGRREEYDVLDKRRGRDPEMGGKPRRKNPQEGLYNELQKDKMAEAYSEIGMKGERRRGKGHDGLYQGLSTATKDTYDALHMQALPPR

SEQ ID NO: 7783 - protein, 433 aa, Artificial Sequence
  source: /note="Description of Artificial Sequence: Synthetic Chimeric Antigen Receptor"
MALPVTALLLPLALLLHAARPQVQLQQPGAELVRPGASVKLSCKASGYSFTTYWMNWVKQRPGQGLEWIGMIHPSDSETRLNQKFKDKATLTVDKSSSTAYMQLSSPTSEDSAVYYCARSTMIATRAMDYWGQGTSVTVSSGGGGSGGGGSGGGGSDIVMTQSQKSMSTSVGDRVSITCKASQDVITGVAWYQQKPGQSPKLLIYSASYRYTGVPDRFTGSGSGTDFTFTISNVQAEDLAVYYCQQHYSTPLTFGAGTKLELKGLAVSTISSFFPPGYQKRGRKKLLYIFKQPFMRPVQTTQEEDGCSCRFPEEEEGGCELRVKFSRSADAPAYQQGQNQLYNELNLGRREEYDVLDKRRGRDPEMGGKPRRKNPQEGLYNELQKDKMAEAYSEIGMKGERRRGKGHDGLYQGLSTATKDTYDALHMQALPPR

SEQ ID NO: 7784 - protein, 486 aa, Artificial Sequence
  source: /note="Description of Artificial Sequence: Synthetic Chimeric Antigen Receptor"
MALPVTALLLPLALLLHAARPQVQLQQPGAELVRPGASVKLSCKASGYSFTTYWMNWVKQRPGQGLEWIGMIHPSDSETRLNQKFKDKATLTVDKSSSTAYMQLSSPTSEDSAVYYCARSTMIATRAMDYWGQGTSVTVSSGGGGSGGGGSGGGGSDIVMTQSQKSMSTSVGDRVSITCKASQDVITGVAWYQQKPGQSPKLLIYSASYRYTGVPDRFTGSGSGTDFTFTISNVQAEDLAVYYCQQHYSTPLTFGAGTKLELKTTTPAPRPPTPAPTIASQPLSLRPEACRPAAGGAVHTRGLDFACDIYIWAPLAGTCGVLLLSLVITLYCKRGRKKLLYIFKQPFMRPVQTTQEEDGCSCRFPEEEEGGCELRVKFSRSADAPAYQQGQNQLYNELNLGRREEYDVLDKRRGRDPEMGGKPRRKNPQEGLYNELQKDKMAEAYSEIGMKGERRRGKGHDGLYQGLSTATKDTYDALHMQALPPR

SEQ ID NO: 7785 - protein, 648 aa, Artificial Sequence
  source: /note="Description of Artificial Sequence: Synthetic Chimeric Antigen Receptor"
MALPVTALLLPLALLLHAARPQVQLQQPGAELVRPGASVKLSCKASGYSFTTYWMNWVKQRPGQGLEWIGMIHPSDSETRLNQKFKDKATLTVDKSSSTAYMQLSSPTSEDSAVYYCARSTMIATRAMDYWGQGTSVTVSSGGGGSGGGGSGGGGSDIVMTQSQKSMSTSVGDRVSITCKASQDVITGVAWYQQKPGQSPKLLIYSASYRYTGVPDRFTGSGSGTDFTFTISNVQAEDLAVYYCQQHYSTPLTFGAGTKLELKEPKSPDKTHTCPPCPAPPVAGPSVFLFPPKPKDTLMIARTPEVTCVVVDVSHEDPEVKFNWYVDGVEVHNAKTKPREEQYNSTYRVVSVLTVLHQDWLNGKEYKCKVSNKALPAPIEKTISKAKGQPREPQVYTLPPSRDELTKNQVSLTCLVKGFYPSDIAVEWESNGQPENNYKTTPPVLDSDGSFFLYSKLTVDKSRWQQGNVFSCSVMHEALHNHYTQKSLSLSPGKKRGRKKLLYIFKQPFMRPVQTTQEEDGCSCRFPEEEEGGCELRVKFSRSADAPAYQQGQNQLYNELNLGRREEYDVLDKRRGRDPEMGGKPRRKNPQEGLYNELQKDKMAEAYSEIGMKGERRRGKGHDGLYQGLSTATKDTYDALHMQALPPR

SEQ ID NO: 7786 - protein, 487 aa, Artificial Sequence; identical to SEQ ID NO: 7775
  source: /note="Description of Artificial Sequence: Synthetic Chimeric Antigen Receptor"

SEQ ID NO: 7787 - protein, 648 aa, Artificial Sequence
  source: /note="Description of Artificial Sequence: Synthetic Chimeric Antigen Receptor"
MALPVTALLLPLALLLHAARPQVQLQQSGPELVKPGASVKISCKASGYAFSSSWMNWVKQRPGQGLEWIGRIYPGDGDTKYNGKFKGKATLTADKSSSTAYMQLSSLTSVDSAVYFCARSTMIATGAMDYWGQGTSVTVSSGGGGSGGGGSGGGGSETTVTQSPASLSMAIGEKVTIRCITSTDIDDDMNWYQQKPGEPPKLLISEGNTLRPGVPSRFSSSGYGTDFVFTIENMLSEDVADYYCLQSDNLPLTFGGGTKLEIKEPKSPDKTHTCPPCPAPPVAGPSVFLFPPKPKDTLMIARTPEVTCVVVDVSHEDPEVKFNWYVDGVEVHNAKTKPREEQYNSTYRVVSVLTVLHQDWLNGKEYKCKVSNKALPAPIEKTISKAKGQPREPQVYTLPPSRDELTKNQVSLTCLVKGFYPSDIAVEWESNGQPENNYKTTPPVLDSDGSFFLYSKLTVDKSRWQQGNVFSCSVMHEALHNHYTQKSLSLSPGKKRGRKKLLYIFKQPFMRPVQTTQEEDGCSCRFPEEEEGGCELRVKFSRSADAPAYQQGQNQLYNELNLGRREEYDVLDKRRGRDPEMGGKPRRKNPQEGLYNELQKDKMAEAYSEIGMKGERRRGKGHDGLYQGLSTATKDTYDALHMQALPPR

SEQ ID NO: 7788 - protein, 487 aa, Artificial Sequence
  source: /note="Description of Artificial Sequence: Synthetic Chimeric Antigen Receptor"
MALPVTALLLPLALLLHAARPQVQLQQSGPELVKPGASVKISCKASGYAFSSSWMNWVKQRPGQGLEWIGRIYPGDGDTKYNGKFKGKATLTADKSSSTAYMQLSSLTSVDSAVYFCARSTMIATGAMDYWGQGTSVTVSSGGGGSGGGGSGGGGSDIVMTQSHKFMSTSVGDRVSITCKASQDVSTAVAWYQQKPGQSPKLLIYSASYRYTGVPDRFTGSGSGTDFTFTISSVQAEDLAVYYCQQHYSTPPYTFGGGTKLEIKTTTPAPRPPTPAPTIASQPLSLRPEACRPAAGGAVHTRGLDFACDIYIWAPLAGTCGVLLLSLVITLYCKRGRKKLLYIFKQPFMRPVQTTQEEDGCSCRFPEEEEGGCELRVKFSRSADAPAYQQGQNQLYNELNLGRREEYDVLDKRRGRDPEMGGKPRRKNPQEGLYNELQKDKMAEAYSEIGMKGERRRGKGHDGLYQGLSTATKDTYDALHMQALPPR

SEQ ID NO: 7789 - protein, 649 aa, Artificial Sequence
  source: /note="Description of Artificial Sequence: Synthetic Chimeric Antigen Receptor"
MALPVTALLLPLALLLHAARPQVQLQQSGPELVKPGASVKISCKASGYAFSSSWMNWVKQRPGQGLEWIGRIYPGDGDTKYNGKFKGKATLTADKSSSTAYMQLSSLTSVDSAVYFCARSTMIATGAMDYWGQGTSVTVSSGGGGSGGGGSGGGGSDIVMTQSHKFMSTSVGDRVSITCKASQDVSTAVAWYQQKPGQSPKLLIYSASYRYTGVPDRFTGSGSGTDFTFTISSVQAEDLAVYYCQQHYSTPPYTFGGGTKLEIKEPKSPDKTHTCPPCPAPPVAGPSVFLFPPKPKDTLMIARTPEVTCVVVDVSHEDPEVKFNWYVDGVEVHNAKTKPREEQYNSTYRVVSVLTVLHQDWLNGKEYKCKVSNKALPAPIEKTISKAKGQPREPQVYTLPPSRDELTKNQVSLTCLVKGFYPSDIAVEWESNGQPENNYKTTPPVLDSDGSFFLYSKLTVDKSRWQQGNVFSCSVMHEALHNHYTQKSLSLSPGKKRGRKKLLYIFKQPFMRPVQTTQEEDGCSCRFPEEEEGGCELRVKFSRSADAPAYQQGQNQLYNELNLGRREEYDVLDKRRGRDPEMGGKPRRKNPQEGLYNELQKDKMAEAYSEIGMKGERRRGKGHDGLYQGLSTATKDTYDALHMQALPPR

SEQ ID NO: 7790 - protein, 459 aa, Artificial Sequence
  source: /note="Description of Artificial Sequence: Synthetic Chimeric Antigen Receptor"
MGWSSIILFLVATATGVHSQVQLQQPGAELVRPGASVKLSCKASGYSFTTYWMNWVKQRPGQGLEWIGMIHPSDSETRLNQKFKDKATLTVDKSSSTAYMQLSSPTSEDSAVYYCARSTMIATRAMDYWGQGTSVTVSGGGGSGGGGSGGGGSDIVMTQSQKSMSTSVGDRVSITCKASQDVITGVAWYQQKPGQSPKLLIYSASYRYTGVPDRFTGSGSGTDFTFTISNVQAEDLAVYYCQQHYSTPLTFGAGTKLELKLEPKSCDKTHTCPPCPDPKFWVLVVVGGVLACYSLLVTVAFIIFWVRSKRSRLLHSDYMNMTPRRPGPTRKHYQPYAPPRDFAAYRSRVKFSRSADAPAYQQGQNQLYNELNLGRREEYDVLDKRRGRDPEMGGKPRRKNPQEGLYNELQKDKMAEAYSEIGMKGERRRGKGHDGLYQGLSTATKDTYDALHMQALPPR

SEQ ID NO: 7791 - protein, 488 aa, Artificial Sequence
  source: /note="Description of Artificial Sequence: Synthetic Chimeric Antigen Receptor"
MALPVTALLLPLALLLHAARPGSDIQMTQSPSSLSASVGDRVTITCRASQGIRNNLAWYQQKPGKAPKRLIYAASNLQSGVPSRFTGSGSGTEFTLIVSSLQPEDFATYYCLQHHSYPLTSGGGTKVEIKRTGSTSGSGKPGSGEGSEVQVLESGGGLVQPGGSLRLSCAASGFTFSSYAMSWVRQAPGKGLEWVSAISGSGGSTNYADSVKGRFTISRDNSKNTLYLQMNSLRAEDTAVYYCAGSSGWSEYWGQGTLVTVSSASTTTPAPRPPTPAPTIASQPLSLRPEACRPAAGGAVHTRGLDFACDIYIWAPLAGTCGVLLLSLVITLYCKRGRKKLLYIFKQPFMRPVQTTQEEDGCSCRFPEEEEGGCELRVKFSRSADAPAYKQGQNQLYNELNLGRREEYDVLDKRRGRDPEMGGKPRRKNPQEGLYNELQKDKMAEAYSEIGMKGERRRGKGHDGLYQGLSTATKDTYDALHMQALPPR

SEQ ID NO: 7792 - protein, 719 aa, Artificial Sequence
  source: /note="Description of Artificial Sequence: Synthetic Chimeric Antigen Receptor"
ADAPAYQQGQNQLYNELNLGRREEYDVLDKRRGRDPEMGGKPRRKNPQEGLYNELQKDKMAEAYSEIGMKGERRRGKGHDGLYQGLSTATKDTYDALHMQALPPRRAEGRGSLLTCGDVEENPGPMAVPTQVLGLLLLWLTDARCDIQMTQSPSSLSASVGDRVTITCRASEDIYFNLVWYQQKPGKAPKLLIYDTNRLADGVPSRFSGSGSGTQYTLTISSLQPEDFATYYCQHYKNYPLTFGQGTKLEIKRSGGGGSGGGGSGGGGSRSEVQLVESGGGLVQPGGSLRLSCAASGFTLSNYGMHWIRQAPGKGLEWVSSISLNGGSTYYRDSVKGRFTISRDNAKSTLYLQMNSLRAEDTAVYYCAAQDAYTGGYFDYWGQGTLVTVSSMPCPAPPVAGPSVFLFPPKPKDTLMIARTPEVTCVVVDVSHEDPEVKFNWYVDGVEVHNAKTKPREEQYNSTYRVVSVLTVLHQDWLNGKEYKCKVSNKALPAPIEKTISKAKPCPAPPVAGPSVFLFPPKPKDTLMIARTPEVTCVVVDVSHEDPEVKFNWYVDGVEVHNAKTKPREEQYNSTYRVVSVLTVLHQDWLNGKEYKCKVSNKALPAPIEKTISKAKMALIVLGGVAGLLLFIGLGIFFMALIVLGGVAGLLLFIGLGIFFCVRCRHRRRSGGGGSSHIQIPPGLTELLQGYTVEVLRQQPPDLVEFAVEYFTRLREARA

SEQ ID NO: 7793 - protein, 671 aa, Artificial Sequence
  source: /note="Description of Artificial Sequence: Synthetic Chimeric Antigen Receptor"
MLTSLLCWMALCLLGADHADACPYSNPSLCSGGGGSELPTQGTFSNVSTNVSPAKPTTTACPYSNPSLCSGGGGSPAPRPPTPAPTIASQPLSLRPEACRPAAGGAVHTRGLDFACDIYIWAPLAGTCGVLLLSLVITLYCNHRNRRRVCKCPRPVVRAEGRGSLLTCGDVEENPGPMETDTLLLWVLLLWVPGSTGDIQMTQTTSSLSASLGDRVTISCRASQDISKYLNWYQQKPDGTVKLLIYHTSRLHSGVPSRFSGSGSGTDYSLTISNLEQEDIATYFCQQGNTLPYTFGGGTKLEITKAGGGGSGGGGSGGGGSGGGGSEVKLQESGPGLVAPSQSLSVTCTVSGVSLPDYGVSWIRQPPRKGLEWLGVIWGSETTYYNSALKSRLTIIKDNSKSQVFLKMNSLQTDDTAIYYCAKHYYYGGSYAMDYWGQGTSVTVSSDPTTTPAPRPPTPAPTIASQPLSLRPEACRPAAGGAVHTRGLDFACDIYIWAPLAGTCGVLLLSLVITLYCKRGRKKLLYIFKQPFMRPVQTTQEEDGCSCRFPEEEEGGCELRVKFSRSADAPAYQQGQNQLYNELNLGRREEYDVLDKRRGRDPEMGGKPRRKNPQEGLYNELQKDKMAEAYSEIGMKGERRRGKGHDGLYQGLSTATKDTYDALHMQALPPR

SEQ ID NO: 7794 - protein, 491 aa, Artificial Sequence
  source: /note="Description of Artificial Sequence: Synthetic Chimeric Antigen Receptor"
MALPVTALLLPLALLLHAARPGSEIQLQQSGAELVKPGASVKLSCTGSGFNIEDYYIHWVKQRTEQGLEWIGRIDPENDETKYGPIFQGRATITADTSSNTVYLQLSSLTSEDTAVYYCAFRGGVYWGPGTTLTVSSGGGGSGGGGSGGGGSHMDVVMTQSPLTLSVAIGQSASISCKSSQSLLDSDGKTYLNWLLQRPGQSPKRLISLVSKLDSGVPDRFTGSGSGTDFTLRISRVEAEDLGIYYCWQGTHFPGTFGGGTKLEIKASTTTPAPRPPTPAPTIASQPLSLRPEACRPAAGGAVHTRGLDFACDIYIWAPLAGTCGVLLLSLVITLYCKRGRKKLLYIFKQPFMRPVQTTQEEDGCSCRFPEEEEGGCELRVKFSRSADAPAYKQGQNQLYNELNLGRREEYDVLDKRRGRDPEMGGKPRRKNPQEGLYNELQKDKMAEAYSEIGMKGERRRGKGHDGLYQGLSTATKDTYDALHMQALPPR

SEQ ID NO: 7795 - protein, 563 aa, Artificial Sequence
  source: /note="Description of Artificial Sequence: Synthetic Chimeric Antigen Receptor"
MKHLWFFLLLVAAPRWVLSQVQLQESGPGLVKPSETLSLTCTVSGGSISSSSYYWGWIRQPPGKGLEWIGSIYYSGSTYYNPSLKSRVTISVDTSKNQFSLKLSSVTAADTAVYYCARLPMVTMSFDYWGQGTLVTVSRGGGGSGGGGSGGGGSMASYVLTQPPSVSVAPGKTARITCGGNNIGSKSVHWYQQKPGQAPVLVIYYDSDRPSGIPERFSGSNSGNTATLTISRVEAGDEADYYCQVWDSSSDHVVFGGGTKLTVLGQPKAAPSVTLFPPSSEELQANKATLVCLISDFYPGAVTVAWKADSSPVKAGVETTTPSKQSNNKYAASSYLSLTPEQWKSHRSYSCQVTHEGSTVEKTVAPTECSTRFWVLVVVGGVLACYSLLVTVAFIIFWVRLRVKFSRSADAPAYQQGQNQLYNELNLGRREEYDVLDKRRGRDPEMGGKPQRRKNPQEGLYNELQKDKMAEAYSEIGMKGERRRGKGHDGLYQGLSTATKDTYDALHMQALPPRRSQCMWPRETQLLLEVPPSTEDARSCQFPEEERGERSAEEKGRLGDLWV

SEQ ID NO: 7796 - protein, 603 aa, Artificial Sequence
  source: /note="Description of Artificial Sequence: Synthetic Chimeric Antigen Receptor"
MKHLWFFLLLVAAPRWVLSQVQLQESGPGLVKPSETLSLTCTVSGGSISSSSYYWGWIRQPPGKGLEWIGSIYYSGSTYYNPSLKSRVTISVDTSKNQFSLKLSSVTAADTAVYYCARLPMVTMSFDYWGQGTLVTVSRGGGGSGGGGSGGGGSMASYVLTQPPSVSVAPGKTARITCGGNNIGSKSVHWYQQKPGQAPVLVIYYDSDRPSGIPERFSGSNSGNTATLTISRVEAGDEADYYCQVWDSSSDHVVFGGGTKLTVLGQPKAAPSVTLFPPSSEELQANKATLVCLISDFYPGAVTVAWKADSSPVKAGVETTTPSKQSNNKYAASSYLSLTPEQWKSHRSYSCQVTHEGSTVEKTVAPTECSTRFWVLVVVGGVLACYSLLVTVAFIIFWVRSKRSRLLHSDYMNMTPRRPGPTRKHYQPYAPPRDFAAYRSLRVKFSRSADAPAYQQGQNQLYNELNLGRREEYDVLDKRRGRDPEMGGKPQRRKNPQEGLYNELQKDKMAEAYSEIGMKGERRRGKGHDGLYQGLSTATKDTYDALHMQALPPRRSQCMWPRETQLLLEVPPSTEDARSCQFPEEERGERSAEEKGRLGDLWV

SEQ ID NO: 7797 - protein, 603 aa, Artificial Sequence [sequence omitted]

SEQ ID NO: 7798 - protein, 603 aa, Artificial Sequence [sequence omitted]

SEQ ID NO: 7799 - protein, 554 aa, Artificial Sequence
  source: /note="Description of Artificial Sequence: Synthetic Chimeric Antigen Receptor"
MKHLWFFLLLVAAPRWVLSQVQLQESGPGLVKPSETLSLTCTVSGGSISSSSYYWGWIRQPPGKGLEWIGSIYYSGSTYYNPSLKSRVTISVDTSKNQFSLKLSSVTAADTAVYYCARLPMVTMSFDYWGQGTLVTVSRGGGGSGGGGSGGGGSMASYVLTQPPSVSVAPGKTARITCGGNNIGSKSVHWYQQKPGQAPVLVIYYDSDRPSGIPERFSGSNSGNTATLTISRVEAGDEADYYCQVWDSSSDHVVFGGGTKLTVLGQPKAAPSVTLFPPSSEELQANKATLVCLISDFYPGAVTVAWKADSSPVKAGVETTTPSKQSNNKYAASSYLSLTPEQWKSHRSYSCQVTHEGSTVEKTVAPTECSTRFWVLVVVGGVLACYSLLVTVAFIIFWVRSKRSRLLHSDYMNMTPRRPGPTRKHYQPYAPPRDFAAYRSLRVKFSRSADAPAYQQGQNQLYNELNLGRREEYDVLDKRRGRDPEMGGKPQRRKNPQEGLYNELQKDKMAEAYSEIGMKGERRRGKGHDGLYQGLSTATKDTYDALHMQALPPR

SEQ ID NO: 7800 - protein, 490 aa, Artificial Sequence
  source: /note="Description of Artificial Sequence: Synthetic Chimeric Antigen Receptor"
MALPVTALLLPLALLLHAARPEIQLVQSGAEVKKPGATVKISCKGSGFNIEDYYIHWVQQAPGKGLEWMGRIDPENDETKYGPIFQGRVTITADTSTNTVYMELSSLRSEDTAVYYCAFRGGVYWGQGTTVTVSSGGGGSGGGGSGGGGSGGGGSDVVMTQSPDSLAVSLGERATINCKSSQSLLDSDGKTYLNWLQQKPGQPPKRLISLVSKLDSGVPDRFSGSGSGTDFTLTISSLQAEDVAVYYCWQGTHFPGTFGGGTKVEIKTTTPAPRPPTPAPTIASQPLSLRPEACRPAAGGAVHTRGLDFACDIYIWAPLAGTCGVLLLSLVITLYCKRGRKKLLYIFKQPFMRPVQTTQEEDGCSCRFPEEEEGGCELRVKFSRSADAPAYKQGQNQLYNELNLGRREEYDVLDKRRGRDPEMGGKPRRKNPQEGLYNELQKDKMAEAYSEIGMKGERRRGKGHDGLYQGLSTATKDTYDALHMQALPPR

SEQ ID NO: 7801 - protein, 484 aa, Artificial Sequence
  source: /note="Description of Artificial Sequence: Synthetic Chimeric Antigen Receptor"
MALPVTALLLPLALLLHAARPDIQMTQSPSSLSASVGDRVTITCRASQGIRNNLAWYQQKPGKAPKRLIYAASNLQSGVPSRFTGSGSGTEFTLIVSSLQPEDFATYYCLQHHSYPLTSGGGTKVEIKRTGSTSGSGKPGSGEGSEVQVLESGGGLVQPGGSLRLSCAASGFTFSSYAMSWVRQAPGKGLEWVSAISGSGGSTNYADSVKGRFTISRDNSKNTLYLQMNSLRAEDTAVYYCAGSSGWSEYWGQGTLVTVSSTTTPAPRPPTPAPTIASQPLSLRPEACRPAAGGAVHTRGLDFACDIYIWAPLAGTCGVLLLSLVITLYCKRGRKKLLYIFKQPFMRPVQTTQEEDGCSCRFPEEEEGGCELRVKFSRSADAPAYKQGQNQLYNELNLGRREEYDVLDKRRGRDPEMGGKPRRKNPQEGLYNELQKDKMAEAYSEIGMKGERRRGKGHDGLYQGLSTATKDTYDALHMQALPPR

SEQ ID NO: 7802 - protein, 490 aa, Artificial Sequence
  source: /note="Description of Artificial Sequence: Synthetic Chimeric Antigen Receptor"
MALPVTALLLPLALLLHAARPDVVMTQSPDSLAVSLGERATINCKSSQSLLDSDGKTYLNWLQQKPGQPPKRLISLVSKLDSGVPDRFSGSGSGTDFTLTISSLQAEDVAVYYCWQGTHFPGTFGGGTKVEIKGGGGSGGGGSGGGGSGGGGSEIQLVQSGAEVKKPGATVKISCKGSGFNIEDYYIHWVQQAPGKGLEWMGRIDPENDETKYGPIFQGRVTITADTSTNTVYMELSSLRSEDTAVYYCAFRGGVYWGQGTTVTVSSTTTPAPRPPTPAPTIASQPLSLRPEACRPAAGGAVHTRGLDFACDIYIWAPLAGTCGVLLLSLVITLYCKRGRKKLLYIFKQPFMRPVQTTQEEDGCSCRFPEEEEGGCELRVKFSRSADAPAYKQGQNQLYNELNLGRREEYDVLDKRRGRDPEMGGKPRRKNPQEGLYNELQKDKMAEAYSEIGMKGERRRGKGHDGLYQGLSTATKDTYDALHMQALPPR

SEQ ID NO: 7803 - protein, 490 aa, Artificial Sequence
  source: /note="Description of Artificial Sequence: Synthetic Chimeric Antigen Receptor"
MALPVTALLLPLALLLHAARPEIQLVQSGAEVKKPGESLRISCKGSGFNIEDYYIHWVRQMPGKGLEWMGRIDPENDETKYGPIFQGHVTISADTSINTVYLQWSSLKASDTAMYYCAFRGGVYWGQGTTVTVSSGGGGSGGGGSGGGGSGGGGSDVVMTQSPLSLPVTLGQPASISCKSSQSLLDSDGKTYLNWLQQRPGQSPRRLISLVSKLDSGVPDRFSGSGSGTDFTLKISRVEAEDVGVYYCWQGTHFPGTFGGGTKVEIKTTTPAPRPPTPAPTIASQPLSLRPEACRPAAGGAVHTRGLDFACDIYIWAPLAGTCGVLLLSLVITLYCKRGRKKLLYIFKQPFMRPVQTTQEEDGCSCRFPEEEEGGCELRVKFSRSADAPAYKQGQNQLYNELNLGRREEYDVLDKRRGRDPEMGGKPRRKNPQEGLYNELQKDKMAEAYSEIGMKGERRRGKGHDGLYQGLSTATKDTYDALHMQALPPR

SEQ ID NO: 7804 - protein, 490 aa, Artificial Sequence
  source: /note="Description of Artificial Sequence: Synthetic Chimeric Antigen Receptor"
MALPVTALLLPLALLLHAARPDVVMTQSPLSLPVTLGQPASISCKSSQSLLDSDGKTYLNWLQQRPGQSPRRLISLVSKLDSGVPDRFSGSGSGTDFTLKISRVEAEDVGVYYCWQGTHFPGTFGGGTKVEIKGGGGSGGGGSGGGGSGGGGSEIQLVQSGAEVKKPGESLRISCKGSGFNIEDYYIHWVRQMPGKGLEWMGRIDPENDETKYGPIFQGHVTISADTSINTVYLQWSSLKASDTAMYYCAFRGGVYWGQGTTVTVSSTTTPAPRPPTPAPTIASQPLSLRPEACRPAAGGAVHTRGLDFACDIYIWAPLAGTCGVLLLSLVITLYCKRGRKKLLYIFKQPFMRPVQTTQEEDGCSCRFPEEEEGGCELRVKFSRSADAPAYKQGQNQLYNELNLGRREEYDVLDKRRGRDPEMGGKPRRKNPQEGLYNELQKDKMAEAYSEIGMKGERRRGKGHDGLYQGLSTATKDTYDALHMQALPPR

SEQ ID NO: 7805 - protein, 490 aa, Artificial Sequence
  source: /note="Description of Artificial Sequence: Synthetic Chimeric Antigen Receptor"
MALPVTALLLPLALLLHAARPEIQLVQSGAEVKKPGATVKISCKGSGFNIEDYYIHWVQQAPGKGLEWMGRIDPENDETKYGPIFQGRVTITADTSTNTVYMELSSLRSEDTAVYYCAFRGGVYWGQGTTVTVSSGGGGSGGGGSGGGGSGGGGSDVVMTQSPLSLPVTLGQPASISCKSSQSLLDSDGKTYLNWLQQRPGQSPRRLISLVSKLDSGVPDRFSGSGSGTDFTLKISRVEAEDVGVYYCWQGTHFPGTFGGGTKVEIKTTTPAPRPPTPAPTIASQPLSLRPEACRPAAGGAVHTRGLDFACDIYIWAPLAGTCGVLLLSLVITLYCKRGRKKLLYIFKQPFMRPVQTTQEEDGCSCRFPEEEEGGCELRVKFSRSADAPAYKQGQNQLYNELNLGRREEYDVLDKRRGRDPEMGGKPRRKNPQEGLYNELQKDKMAEAYSEIGMKGERRRGKGHDGLYQGLSTATKDTYDALHMQALPPR

SEQ ID NO: 7806 - protein, 490 aa, Artificial Sequence
  source: /note="Description of Artificial Sequence: Synthetic Chimeric Antigen Receptor"
MALPVTALLLPLALLLHAARPEIQLVQSGAEVKKPGESLRISCKGSGFNIEDYYIHWVRQMPGKGLEWMGRIDPENDETKYGPIFQGHVTISADTSINTVYLQWSSLKASDTAMYYCAFRGGVYWGQGTTVTVSSGGGGSGGGGSGGGGSGGGGSDVVMTQSPDSLAVSLGERATINCKSSQSLLDSDGKTYLNWLQQKPGQPPKRLISLVSKLDSGVPDRFSGSGSGTDFTLTISSLQAEDVAVYYCWQGTHFPGTFGGGTKVEIKTTTPAPRPPTPAPTIASQPLSLRPEACRPAAGGAVHTRGLDFACDIYIWAPLAGTCGVLLLSLVITLYCKRGRKKLLYIFKQPFMRPVQTTQEEDGCSCRFPEEEEGGCELRVKFSRSADAPAYKQGQNQLYNELNLGRREEYDVLDKRRGRDPEMGGKPRRKNPQEGLYNELQKDKMAEAYSEIGMKGERRRGKGHDGLYQGLSTATKDTYDALHMQALPPR

SEQ ID NO: 7807 - protein, 490 aa, Artificial Sequence
  source: /note="Description of Artificial Sequence: Synthetic Chimeric Antigen Receptor"
MALPVTALLLPLALLLHAARPDVVMTQSPDSLAVSLGERATINCKSSQSLLDSDGKTYLNWLQQKPGQPPKRLISLVSKLDSGVPDRFSGSGSGTDFTLTISSLQAEDVAVYYCWQGTHFPGTFGGGTKVEIKGGGGSGGGGSGGGGSGGGGSEIQLVQSGAEVKKPGESLRISCKGSGFNIEDYYIHWVRQMPGKGLEWMGRIDPENDETKYGPIFQGHVTISADTSINTVYLQWSSLKASDTAMYYCAFRGGVYWGQGTTVTVSSTTTPAPRPPTPAPTIASQPLSLRPEACRPAAGGAVHTRGLDFACDIYIWAPLAGTCGVLLLSLVITLYCKRGRKKLLYIFKQPFMRPVQTTQEEDGCSCRFPEEEEGGCELRVKFSRSADAPAYKQGQNQLYNELNLGRREEYDVLDKRRGRDPEMGGKPRRKNPQEGLYNELQKDKMAEAYSEIGMKGERRRGKGHDGLYQGLSTATKDTYDALHMQALPPR

SEQ ID NO: 7808 - protein, 490 aa, Artificial Sequence
  source: /note="Description of Artificial Sequence: Synthetic Chimeric Antigen Receptor"
MALPVTALLLPLALLLHAARPDVVMTQSPLSLPVTLGQPASISCKSSQSLLDSDGKTYLNWLQQRPGQSPRRLISLVSKLDSGVPDRFSGSGSGTDFTLKISRVEAEDVGVYYCWQGTHFPGTFGGGTKVEIKGGGGSGGGGSGGGGSGGGGSEIQLVQSGAEVKKPGATVKISCKGSGFNIEDYYIHWVQQAPGKGLEWMGRIDPENDETKYGPIFQGRVTITADTSTNTVYMELSSLRSEDTAVYYCAFRGGVYWGQGTTVTVSSTTTPAPRPPTPAPTIASQPLSLRPEACRPAAGGAVHTRGLDFACDIYIWAPLAGTCGVLLLSLVITLYCKRGRKKLLYIFKQPFMRPVQTTQEEDGCSCRFPEEEEGGCELRVKFSRSADAPAYKQGQNQLYNELNLGRREEYDVLDKRRGRDPEMGGKPRRKNPQEGLYNELQKDKMAEAYSEIGMKGERRRGKGHDGLYQGLSTATKDTYDALHMQALPPR

SEQ ID NO: 7809 - protein, 487 aa, Artificial Sequence
  source: /note="Description of Artificial Sequence: Synthetic Chimeric Antigen Receptor"
MALPVTALLLPLALLLHAARPEIQLQQSGAELVKPGASVKLSCTGSGFNIEDYYIHWVKQRTEQGLEWIGRIDPENDETKYGPIFQGRATITADTSSNTVYLQLSSLTSEDTAVYYCAFRGGVYWGPGTTLTVSSGGGGSGGGGSGGGGSHMDVVMTQSPLTLSVAIGQSASISCKSSQSLLDSDGKTYLNWLLQRPGQSPKRLISLVSKLDSGVPDRFTGSGSGTDFTLRISRVEAEDLGIYYCWQGTHFPGTFGGGTKLEIKTTTPAPRPPTPAPTIASQPLSLRPEACRPAAGGAVHTRGLDFACDIYIWAPLAGTCGVLLLSLVITLYCKRGRKKLLYIFKQPFMRPVQTTQEEDGCSCRFPEEEEGGCELRVKFSRSADAPAYKQGQNQLYNELNLGRREEYDVLDKRRGRDPEMGGKPRRKNPQEGLYNELQKDKMAEAYSEIGMKGERRRGKGHDGLYQGLSTATKDTYDALHMQALPPR

SEQ ID NO: 7810 - protein, 535 aa, Artificial Sequence; identical to SEQ ID NO: 7772
  source: /note="Description of Artificial Sequence: Synthetic Chimeric Antigen Receptor"

SEQ ID NO: 7811 - protein, 461 aa, Artificial Sequence
  source: /note="Description of Artificial Sequence: Synthetic Chimeric Antigen Receptor"
EVQVLESGGGLVQPGGSLRLSCAASGFTFSSYAMSWVRQAPGKGLEWVSAISGSGGSTNYADSVKGRFTISRDNSKNTLYLQMNSLRAEDTAVYYCAGSSGWSEYWGQGTLVTVSSGGGGSGGGGSGGGGSDIQMTQSPSSLSASVGDRVTITCRASQGIRNNLAWYQQKPGKAPKRLIYAASNLQSGVPSRFTGSGSGTEFTLIVSSLQPEDFATYYCLQHHSYPLTSGGGTKVEIKTTTPAPRPPTPAPTIASQPLSLRPEACRPAAGGAVHTRGLDFACDIYIWAPLAGTCGVLLLSLVITLYCKRGRKKLLYIFKQPFMRPVQTTQEEDGCSCRFPEEEEGGCELRVKFSRSADAPAYQQGQNQLYNELNLGRREEYDVLDKRRGRDPEMGGKPRRKNPQEGLYNELQKDKMAEAYSEIGMKGERRRGKGHDGLYQGLSTATKDTYDALHMQALPPR

SEQ ID NO: 7812 - protein, 647 aa, Artificial Sequence
  source: /note="Description of Artificial Sequence: Synthetic Chimeric Antigen Receptor"
EVQVLESGGGLVQPGGSLRLSCAASGFTFSSYAMSWVRQAPGKGLEWVSAISGSGGSTNYADSVKGRFTISRDNSKNTLYLQMNSLRAEDTAVYYCAGSSGWSEYWGQGTLVTVSSGGGGSGGGGSGGGGSDIQMTQSPSSLSASVGDRVTITCRASQGIRNNLAWYQQKPGKAPKRLIYAASNLQSGVPSRFTGSGSGTEFTLIVSSLQPEDFATYYCLQHHSYPLTSGGGTKVEIKEPKSPDKTHTCPPCPAPPVAGPSVFLFPPKPKDTLMIARTPEVTCVVVDVSHEDPEVKFNWYVDGVEVHNAKTKPREEQYNSTYRVVSVLTVLHQDWLNGKEYKCKVSNKALPAPIEKTISKAKGQPREPQVYTLPPSRDELTKNQVSLTCLVKGFYPSDIAVEWESNGQPENNYKTTPPVLDSDGSFFLYSKLTVDKSRWQQGNVFSCSVMHEALHNHYTQKSLSLSPGKIYIWAPLAGTCGVLLLSLVITLYCKRGRKKLLYIFKQPFMRPVQTTQEEDGCSCRFPEEEEGGCELRVKFSRSADAPAYQQGQNQLYNELNLGRREEYDVLDKRRGRDPEMGGKPRRKNPQEGLYNELQKDKMAEAYSEIGMKGERRRGKGHDGLYQGLSTATKDTYDALHMQALPPR

SEQ ID NO: 7813 - protein, 464 aa, Artificial Sequence
  source: /note="Description of Artificial Sequence: Synthetic Chimeric Antigen Receptor"
QVQLQQSGGGLVKPGASLKLSCVTSGFTFRKFGMSWVRQTSDKRLEWVASISTGGYNTYYSDNVKGRFTISRENAKNTLYLQMSSLKSEDTALYYCTRGYSSTSYAMDYWGQGTTVTVGGGGSGGGGSGGGGSDIELTQSPASLSVATGEKVTIRCMTSTDIDDDMNWYQQKPGEPPKFLISEGNTLRPGVPSRFSSSGTGTDFVFTIENTLSEDVGDYYCLQSFNVPLTFGDGTKLEKALTTTPAPRPPTPAPTIASQPLSLRPEACRPAAGGAVHTRGLDFACDIYIWAPLAGTCGVLLLSLVITLYCKRGRKKLLYIFKQPFMRPVQTTQEEDGCSCRFPEEEEGGCELRVKFSRSADAPAYQQGQNQLYNELNLGRREEYDVLDKRRGRDPEMGGKPRRKNPQEGLYNELQKDKMAEAYSEIGMKGERRRGKGHDGLYQGLSTATKDTYDALHMQALPPR

SEQ ID NO: 7814 - protein, 650 aa, Artificial Sequence
  source: /note="Description of Artificial Sequence: Synthetic Chimeric Antigen Receptor"
QVQLQQSGGGLVKPGASLKLSCVTSGFTFRKFGMSWVRQTSDKRLEWVASISTGGYNTYYSDNVKGRFTISRENAKNTLYLQMSSLKSEDTALYYCTRGYSSTSYAMDYWGQGTTVTVGGGGSGGGGSGGGGSDIELTQSPASLSVATGEKVTIRCMTSTDIDDDMNWYQQKPGEPPKFLISEGNTLRPGVPSRFSSSGTGTDFVFTIENTLSEDVGDYYCLQSFNVPLTFGDGTKLEKALEPKSPDKTHTCPPCPAPPVAGPSVFLFPPKPKDTLMIARTPEVTCVVVDVSHEDPEVKFNWYVDGVEVHNAKTKPREEQYNSTYRVVSVLTVLHQDWLNGKEYKCKVSNKALPAPIEKTISKAKGQPREPQVYTLPPSRDELTKNQVSLTCLVKGFYPSDIAVEWESNGQPENNYKTTPPVLDSDGSFFLYSKLTVDKSRWQQGNVFSCSVMHEALHNHYTQKSLSLSPGKIYIWAPLAGTCGVLLLSLVITLYCKRGRKKLLYIFKQPFMRPVQTTQEEDGCSCRFPEEEEGGCELRVKFSRSADAPAYQQGQNQLYNELNLGRREEYDVLDKRRGRDPEMGGKPRRKNPQEGLYNELQKDKMAEAYSEIGMKGERRRGKGHDGLYQGLSTATKDTYDALHMQALPPR

SEQ ID NO: 7815 - protein, 482 aa, Artificial Sequence
  source: /note="Description of Artificial Sequence: Synthetic Chimeric Antigen Receptor"
MALPVTALLLPLALLLHAARPDIQMTQSPSSLSASVGDRVTITCRASQGIRNNLAWYQQKPGKAPKRLIYAASNLQSGVPSRFTGSGSGTEFTLIVSSLQPEDFATYYCLQHHSYPLTSGGGTKVEIKGGGGSGGGGSGGGGSEVQVLESGGGLVQPGGSLRLSCAASGFTFSSYAMSWVRQAPGKGLEWVSAISGSGGSTNYADSVKGRFTISRDNSKNTLYLQMNSLRAEDTAVYYCAGSSGWSEYWGQGTLVTVSSTTTPAPRPPTPAPTIASQPLSLRPEACRPAAGGAVHTRGLDFACDIYIWAPLAGTCGVLLLSLVITLYCKRGRKKLLYIFKQPFMRPVQTTQEEDGCSCRFPEEEEGGCELRVKFSRSADAPAYQQGQNQLYNELNLGRREEYDVLDKRRGRDPEMGGKPRRKNPQEGLYNELQKDKMAEAYSEIGMKGERRRGKGHDGLYQGLSTATKDTYDALHMQALPPR

SEQ ID NO: 7816 - protein, 672 aa, Artificial Sequence [sequence omitted]

SEQ ID NO: 7817 - protein, 485 aa, Artificial Sequence
  source: /note="Description of Artificial Sequence: Synthetic Chimeric Antigen Receptor"
MALPVTALLLPLALLLHAARPQVQLQQSGGGLVKPGASLKLSCVTSGFTFRKFGMSWVRQTSDKRLEWVASISTGGYNTYYSDNVKGRFTISRENAKNTLYLQMSSLKSEDTALYYCTRGYSSTSYAMDYWGQGTTVTVGGGGSGGGGSGGGGSDIELTQSPASLSVATGEKVTIRCMTSTDIDDDMNWYQQKPGEPPKFLISEGNTLRPGVPSRFSSSGTGTDFVFTIENTLSEDVGDYYCLQSFNVPLTFGDGTKLEKALTTTPAPRPPTPAPTIASQPLSLRPEACRPAAGGAVHTRGLDFACDIYIWAPLAGTCGVLLLSLVITLYCKRGRKKLLYIFKQPFMRPVQTTQEEDGCSCRFPEEEEGGCELRVKFSRSADAPAYQQGQNQLYNELNLGRREEYDVLDKRRGRDPEMGGKPRRKNPQEGLYNELQKDKMAEAYSEIGMKGERRRGKGHDGLYQGLSTATKDTYDALHMQALPPR

SEQ ID NO: 7818 - protein, 675 aa, Artificial Sequence [sequence omitted]

SEQ ID NO: 7819 - protein, 457 aa, Artificial Sequence
  source: /note="Description of Artificial Sequence: Synthetic Chimeric Antigen Receptor"
MALPVTALLLPLALLLHAARPDIQMTQSPSSLSASVGDRVTITCRASQGIRNNLAWYQQKPGKAPKRLIYAASNLQSGVPSRFTGSGSGTEFTLIVSSLQPEDFATYYCLQHHSYPLTSGGGTKVEIKRTGSTSGSGKPGSGEGSEVQVLESGGGLVQPGGSLRLSCAASGFTFSSYAMSWVRQAPGKGLEWVSAISGSGGSTNYADSVKGRFTISRDNSKNTLYLQMNSLRAEDTAVYYCAGSSGWSEYWGQGTLVTVSSTTTPAPRPPTPAPTIASQPLSLRPEACRPAAGGAVHTRGLDFACDIYIWAPLAGTCGVLLLSLVITLYCKRGRKKLLGGGGSGGGGSGVQVETISPGDGRTFPKRGQTCVVHYTGMLEDGKKFDSSRDRNKPFKFMLGKQEVIRGWEEGVAQMSVGQRAKLTISPDYAYGATGHPGIIPPHATLVFDVELLKLETS

SEQ ID NO: 7820 - protein, 439 aa, Artificial Sequence
  source: /note="Description of Artificial Sequence: Synthetic Chimeric Antigen Receptor"
MALPVTALLLPLALLLHAARPDIQMTQSPSSLSASVGDRVTITCRASQGIRNNLAWYQQKPGKAPKRLIYAASNLQSGVPSRFTGSGSGTEFTLIVSSLQPEDFATYYCLQHHSYPLTSGGGTKVEIKRTGSTSGSGKPGSGEGSEVQVLESGGGLVQPGGSLRLSCAASGFTFSSYAMSWVRQAPGKGLEWVSAISGSGGSTNYADSVKGRFTISRDNSKNTLYLQMNSLRAEDTAVYYCAGSSGWSEYWGQGTLVTVSSTTTPAPRPPTPAPTIASQPLSLRPEACRPAAGGAVHTRGLDFACDIYIWAPLAGTCGVLLLSLVITLYCKRGRKKLLGGGGSGGGGSKRDHHHHHHQDKKTMMMNEEDDGNGMDELLAVLGYKVRSSEMADVAQKLEQLEVMMSNVQEDDLSQLATETVHYNPAELYTWLDSMLTDLN

SEQ ID NO: 7821 - protein, 692 aa, Artificial Sequence
  source: /note="Description of Artificial Sequence: Synthetic Chimeric Antigen Receptor"
MALPVTALLLPLALLLHAARPDIQMTQSPSSLSASVGDRVTITCRASQGIRNNLAWYQQKPGKAPKRLIYAASNLQSGVPSRFTGSGSGTEFTLIVSSLQPEDFATYYCLQHHSYPLTSGGGTKVEIKRTGSTSGSGKPGSGEGSEVQVLESGGGLVQPGGSLRLSCAASGFTFSSYAMSWVRQAPGKGLEWVSAISGSGGSTNYADSVKGRFTISRDNSKNTLYLQMNSLRAEDTAVYYCAGSSGWSEYWGQGTLVTVSSTTTPAPRPPTPAPTIASQPLSLRPEACRPAAGGAVHTRGLDFACDIYIWAPLAGTCGVLLLSLVITLYCKRGRKKLLGGGGSGGGGSAASDEVNLIESRTVVPLNTWVLISNFKVAYNILRRPDGTFNRHLAEYLDRKVTANANPVDGVFSFDVLIDRRINLLSRVYRPAYADQEQPPSILDLEKPVDGDIVPVILFFHGGSFAHSSANSAIYDTLCRRLVGLCKCVVVSVNYRRAPENPYPCAYDDGWIALNWVNSRSWLKSKKDSKVHIFLAGDSSGGNIAHNVALRAGESGIDVLGNILLNPMFGGNERTESEKSLDGKYFVTVRDRDWYWKAFLPEGEDREHPACNPFSPRGKSLEGVSFPKSLVVVAGLDLIRDWQLAYAEGLKKAGQEVKLMHLEKATVGFYLLPNNNHFHNVMDEISAFVNAEC

SEQ ID NO: 7822 - protein, 567 aa, Artificial Sequence
  source: /note="Description of Artificial Sequence: Synthetic Chimeric Antigen Receptor"
MALPVTALLLPLALLLHAARPDIQMTQSPSSLSASVGDRVTITCRASQGIRNNLAWYQQKPGKAPKRLIYAASNLQSGVPSRFTGSGSGTEFTLIVSSLQPEDFATYYCLQHHSYPLTSGGGTKVEIKRTGSTSGSGKPGSGEGSEVQVLESGGGLVQPGGSLRLSCAASGFTFSSYAMSWVRQAPGKGLEWVSAISGSGGSTNYADSVKGRFTISRDNSKNTLYLQMNSLRAEDTAVYYCAGSSGWSEYWGQGTLVRVSSTTTPAPRPPTPAPTIASQPLSLRPEACRPAAGGAVHTRGLDFACDIYIWAPLAGTCGVLLLSLVITLYCKRGRKKLLGGGGSGGGGSSNSYDSSSIKVLKGLDAVRKRPGMYIGDTDDGTGLHHMVFEVVDNAIDEALAGHCKEIIVTIHADNSVSVQDDGRGIPTGIHPEEGVSAAEVIMTVLHAGGKFDDNSYKVSGGLHGVGVSVVNALSQKLELVIQREGKIHRQIYEHGVPQAPLAVTGETEKTGTMVRFWPSLETFTNVTEFEYEILAKRLRELSFLNSGVSIRLRDKRDGKEDHFHYEG

SEQ ID NO: 7823 - protein, 456 aa, Artificial Sequence
  source: /note="Description of Artificial Sequence: Synthetic Chimeric Antigen Receptor"
MALPVTALLLPLALLLHAARPDIQMTQSPSSLSASVGDRVTITCRASQGIRNNLAWYQQKPGKAPKRLIYAASNLQSGVPSRFTGSGSGTEFTLIVSSLQPEDFATYYCLQHHSYPLTSGGGTKVEIKRTGSTSGSGKPGSGEGSEVQVLESGGGLVQPGGSLRLSCAASGFTFSSYAMSWVRQAPGKGLEWVSAISGSGGSTNYADSVKGRFTISRDNSKNTLYLQMNSLRAEDTAVYYCAGSSGWSEYWGQGTLVTVSSKRGRKKLLGGGGSGGGSGVQVETISPGDGRTFPKRGQTCVVHYTGMLEDGKKFDSSRDRNKPFKFMLGKQEVIRGWEEGVAQMSVGQRAKLTISPDYAYGATGHPGIIPPHATLVFDVELLKLETSTTTPAPRPPTPAPTIASQPLSLRPEACRPAAGGAVHTRGLDFACDIYIWAPLAGTCGVLLLSLVITLYC

SEQ ID NO: 7824 - protein, 446 aa, Artificial Sequence
  source: /note="Description of Artificial Sequence: Synthetic Chimeric Antigen Receptor"
MALPVTALLLPLALLLHAARPDIQMTQSPSSLSASVGDRVTITCRASQGIRNNLAWYQQKPGKAPKRLIYAASNLQSGVPSRFTGSGSGTEFTLIVSSLQPEDFATYYCLQHHSYPLTSGGGTKVEIKRTGSTSGSGKPGSGEGSEVQVLESGGGLVQPGGSLRLSCAASGFTFSSYAMSWVRQAPGKGLEWVSAISGSGGSTNVADSVKGRFTISRDNSKNTLVLQMNSLRAEDTAVYYCAGSSGWSEYWGQGTLVTVSSKRGRKKLLGGGGSGGGGSASRILWHEMWHEGLEEASRLYFGERNVKGMFEVLEPLHAMMERGPQTLKETSFNQAYGRDLMEAQEWCRKYMKSGNVKDLLQAWDLYYHVFRRISKTSTTTPAPRPPTPAPTIASQPLSLRPEACRPAAGGAVHTRGLDFACDIYIWAPLAGTCGVLLLSLVITLYC

SEQ ID NO: 7825 - protein, 446 aa, Artificial Sequence
  source: /note="Description of Artificial Sequence: Synthetic Chimeric Antigen Receptor"
MALPVTALLLPLALLLHAARPDIQMTQSPSSLSASVGDRVTITCRASQGIRNNLAWYQQKPGKAPKRLIYAASNLQSGVPSRFTGSGSGTEFTLIVSSLQPEDFATYYCLQHHSYPLTSGGGTKVEIKRTGSTSGSGKPGSGEGSEVQVLESGGGLVQPGGSLRLSCAASGFTFSSYAMSWVRQAPGKGLEWVSAISGSGGSTNYADSVKGRFTISRDNSKNTLYLQMNSLRAEDTAVYYCAGSSGWSEYWGQGTLVTVSSTTTPAPRPPTPAPTIASQPLSLRPEACRPAAGGAVHTRGLDFACDIYIWAPLAGTCGVLLLSLVITLYCKRGRKKLLGGGGSGGGGSASRILWHEMWHEGLEEASRLYFGERNVKGMFEVLEPLHAMMERGPQTLKETSFNQAYGRDLMEAQEWCRKYMKSGNVKDLLQAWDLYYHVFRRISKTS

SEQ ID NO: 7826 - protein, 548 aa, Artificial Sequence
  source: /note="Description of Artificial Sequence: Synthetic Chimeric Antigen Receptor"
MVLLVTSLLLCELPHPAFLLIPDIQMTQSPSSLSASVGDRVTITCRASQGIRNNLAWYQQKPGKAPKRLIYAASNLQSGVPSRFTGSGSGTEFTLIVSSLQPEDFATYYCLQHHSYPLTSGGGTKVEIKRTGSTSGSGKPGSGEGSEVQVLESGGGLVQPGGSLRLSCAASGFTFSSYAMSWVRQAPGKGLEWVSAISGSGGSTNYADSVKGRFTISRDNSKNTLYLQMNSLRAEDTAVYYCAGSSGWSEYWGQGTLVTVSSAAAFVPVFLPAKPTTTPAPRPPTPAPTIASQPLSLRPEACRPAAGGAVHTRGLDFACDIYIWAPLAGTCGVLLLSLVITLYCNHRNRSKRSRLLHSDYMNMTPRRPGPTRKHYQPYAPPRDFAAYRSRFSVVKRGRKKLLYIFKQPFMRPVQTTQEEDGCSCRFPEEEEGGCELRVKFSRSADAPAYQQGQNQLYNELNLGRREEYDVLDKRRGRDPEMGGKPRRKNPQEGLYNELQKDKMAEAYSEIGMKGERRRGKGHDGLYQGLSTATKDTYDALHMQALPPR

SEQ ID NO: 7827 - protein, 484 aa, Artificial Sequence
  source: /note="Description of Artificial Sequence: Synthetic Chimeric Antigen Receptor"
MVLLVTSLLLCELPHPAFLLIPDIQMTQSPSSLSASVGDRVTITCRASQGIRNNLAWYQQKPGKAPKRLIYAASNLQSGVPSRFTGSGSGTEFTLIVSSLQPEDFATYYCLQHHSYPLTSGGGTKVEIKRTGSTSGSGKPGSGEGSEVQVLESGGGLVQPGGSLRLSCAASGFTFSSYAMSWVRQAPGKGLEWVSAISGSGGSTNYADSVKGRFTISRDNSKNTLYLQMNSLRAEDTAVYYCAGSSGWSEYWGQGTLVTVSSAAAIEVMYPPPYLDNEKSNGTIIHVKGKHLCPSPLFPGPSKPFWVLVVVGGVLACYSLLVTVAFIIFWVRSKRSRLLHSDYMNMTPRRPGPTRKHYQPYAPPRDFAAYRSRVKFSRSADAPAYQQGQNQLYNELNLGRREEYDVLDKRRGRDPEMGGKPRRKNPQEGLYNELQKDKMAEAYSEIGMKGERRRGKGHDGLYQGLSTATKDTYDALHMQALPPR

SEQ ID NO: 7828 - protein, 491 aa, Artificial Sequence; identical to SEQ ID NO: 7794
  source: /note="Description of Artificial Sequence: Synthetic Chimeric Antigen Receptor"

SEQ ID NO: 7829 - protein, 490 aa, Artificial Sequence; identical to SEQ ID NO: 7803
  source: /note="Description of Artificial Sequence: Synthetic Chimeric Antigen Receptor"

SEQ ID NO: 7830 - protein, 490 aa, Artificial Sequence; identical to SEQ ID NO: 7804
  source: /note="Description of Artificial Sequence: Synthetic Chimeric Antigen Receptor"

SEQ ID NO: 7831 - protein, 490 aa, Artificial Sequence
  source: /note="Description of Artificial Sequence: Synthetic Chimeric Antigen Receptor"
MALPVTALLLPLALLLHAARPEIQLVQSSAEVKKPSATVKISCKSSSFNIEDYYIHWVQQAPGKGLEWMGRIDPENDETKYGPIFQGRVTITADTSTNTVYMELSSLRSEDTAVYYCAFRGGVYWGQGTTVTVSSGGGGSGGGGSGGGGSGGGGSDVVMTQSPLSLPVTLGQPASISCKSSQSLLDSDGKTYLNWLQQRPGQSPRRLISLVSKLDSGVPDRFSGSGSGTDFTLKISRVEAEDVGVYYCWQGTHFPGTFGGGTKVEIKTTTPAPRPPTPAPTIASQPLSLRPEACRPAAGGAVHTRGLDFACDIYIWAPLAGTCGVLLLSLVITLYCKRGRKKLLYIFKQPFMRPVQTTQEEDGCSCRFPEEEEGGCELRVKFSRSADAPAYKQGQNQLYNELNLGRREEYDVLDKRRGRDPEMGGKPRRKNPQEGLYNELQKDKMAEAYSEIGMKGERRRGKGHDGLYQGLSTATKDTYDALHMQALPPR

SEQ ID NO: 7832 - protein, 490 aa, Artificial Sequence; identical to SEQ ID NO: 7806
  source: /note="Description of Artificial Sequence: Synthetic Chimeric Antigen Receptor"

SEQ ID NO: 7833 - protein, 490 aa, Artificial Sequence; identical to SEQ ID NO: 7807
  source: /note="Description of Artificial Sequence: Synthetic Chimeric Antigen Receptor"

SEQ ID NO: 7834 - protein, 491 aa, Artificial Sequence
  source: /note="Description of Artificial Sequence: Synthetic Chimeric Antigen Receptor"
MALPVTALLLPLALLLHAARPDVVMTQSPLSLPVTLGQPASISCKSSCISLLDSDGKTYLNWLQQRPGQSPRRLISLVSKLDSGVPDRFSGSGSGTDFTLKISRVEAEDVGVYYCWQGTHFPGTFGGGTKVEIKGGGGSGGGGSGGGGSGGGGSEIQLVQSGAEVKKPGATVKISCKGSGFNIEDYYIHWVQQAPGKGLEWMGRIDPENDETKYGPIFQGRVTITADTSTNTVYMELSSLRSEDTAVYYCAFRGGVYWGQGTTVTVSSTTTPAPRPPTPAPTIASQPLSLRPEACRPAAGGAVHTRGLDFACDIYIWAPLAGTCGVLLLSLVITLYCKRGRKKLLYIFKQPFMRPVQTTQEEDGCSCRFPEEEEGGCELRVKFSRSADAPAYKQGQNQLYNELNLGRREEYDVLDKRRGRDPEMGGKPRRKNPQEGLYNELQKDKMAEAYSEIGMKGERRRGKGHDGLYQGLSTATKDTYDALHMQALPPR

SEQ ID NO: 7835 - protein, 490 aa, Artificial Sequence; identical to SEQ ID NO: 7808
  source: /note="Description of Artificial Sequence: Synthetic Chimeric Antigen Receptor"

SEQ ID NO: 7836 - protein, 484 aa, Artificial Sequence; identical to SEQ ID NO: 7801
  source: /note="Description of Artificial Sequence: Synthetic Chimeric Antigen Receptor"

SEQ ID NO: 7837 - protein, 490 aa, Artificial Sequence; identical to SEQ ID NO: 7802
  source: /note="Description of Artificial Sequence: Synthetic Chimeric Antigen Receptor"

SEQ ID NO: 7838 - protein, 490 aa, Artificial Sequence; identical to SEQ ID NO: 7803
  source: /note="Description of Artificial Sequence: Synthetic Chimeric Antigen Receptor"

SEQ ID NO: 7839 - protein, 490 aa, Artificial Sequence; identical to SEQ ID NO: 7804
  source: /note="Description of Artificial Sequence: Synthetic Chimeric Antigen Receptor"

SEQ ID NO: 7840 - protein, 490 aa, Artificial Sequence; identical to SEQ ID NO: 7805
  source: /note="Description of Artificial Sequence: Synthetic Chimeric Antigen Receptor"

SEQ ID NO: 7841 - protein, 490 aa, Artificial Sequence; identical to SEQ ID NO: 7806
  source: /note="Description of Artificial Sequence: Synthetic Chimeric Antigen Receptor"

SEQ ID NO: 7842 - protein, 490 aa, Artificial Sequence; identical to SEQ ID NO: 7807
  source: /note="Description of Artificial Sequence: Synthetic Chimeric Antigen Receptor"

SEQ ID NO: 7843 - protein, 490 aa, Artificial Sequence; identical to SEQ ID NO: 7808
  source: /note="Description of Artificial Sequence: Synthetic Chimeric Antigen Receptor"

SEQ ID NO: 7844 - protein, 487 aa, Artificial Sequence; identical to SEQ ID NO: 7809
  source: /note="Description of Artificial Sequence: Synthetic Chimeric Antigen Receptor"

SEQ ID NO: 7845 - protein, 548 aa, Artificial Sequence; identical to SEQ ID NO: 7826
  source: /note="Description of Artificial Sequence: Synthetic Chimeric Antigen Receptor"

SEQ ID NO: 7846 - protein, 484 aa, Artificial Sequence; identical to SEQ ID NO: 7827
  source: /note="Description of Artificial Sequence: Synthetic Chimeric Antigen Receptor"

SEQ ID NO: 7847 - protein, 491 aa, Artificial Sequence; identical to SEQ ID NO: 7794
  source: /note="Description of Artificial Sequence: Synthetic Chimeric Antigen Receptor"

SEQ ID NO: 7848 - protein, 535 aa, Artificial Sequence; identical to SEQ ID NO: 7772
  source: /note="Description of Artificial Sequence: Synthetic Chimeric Antigen Receptor"

SEQ ID NO: 7849 - protein, 243 aa, Artificial Sequence; identical to SEQ ID NO: 6158
  source: /note="Description of Artificial Sequence: Synthetic Chimeric Antigen Receptor"

SEQ ID NO: 7850 - protein, 240 aa, Artificial Sequence; identical to SEQ ID NO: 6128
  source: /note="Description of Artificial Sequence: Synthetic Chimeric Antigen Receptor"

SEQ ID NO: 7851 - protein, 1347 aa, Artificial Sequence
  source: /note="Description of Artificial Sequence: Synthetic Chimeric Antigen Receptor"
QVQLVESGPGVVQPGRSLRISCAVSGFSVTNYGVHWVRQPPGKGLEWLGVRWAGGITNYNSAFMSRLTISKDNSKNTVYLQMNSLRAEDTAMYYCASRGGHYGYALDYWGQGTLVTVSSASTKGPSVFPLAPSSKSTSGGTAALGCLVKDYFPEPVTVSWNSGALTSGVHTFPAVLQSSGLYSLSSVVTVPSSSLGTQTYICNVNHKPSNTKVDKRVEPKSCDKTHTCPPCPAPELLGGPSVFLFPPKPKDTLMISRTPEVTCVVVDVSHEDPEVKFNWYVDGVEVHNAKTKPREEQYNSTYRVVSVLTVLHQDWLNGKEYKCKVSNKALPAPIEKTISKAKGQPREPQVYTLPPSRDELTKNQVSLTCLVKGFYPSDIAVEWESNGQPENNYKTTPPVLDSDGSFFLYSKLTVDKSRWQQGNVFSCSVMHEALHNHYTQKSLSLSPGKGSTSGSGKPGSSEGSTKGEIVMTQTPATLSVSAGERVTITCKASQSVSNDVTWYQQKPGQAPRLLIYSASNRYSGVPARFSGSGYGTEFTFTISSVQSEDFAVYFCQQDYSSFGQGTKLEIKRTVAAPSVFIFPPSDEQLKSGTASVVCLLNNFYPREAKVQWKVDNALQSGNSQESVTEQDSKDSTYSLSSTLTLSKADYEKHKVYACEVTHQGLSSPVTKSFNRGECGSTSGSGKPGSSEGSTKGFWVLVVVGGVLACYSLLVTVAFIIFWVKRGRKKLLYIFKQPFMRPVQTTQEEDGCSCRFPEEEEGGCELQRRKYRSNKGESPVEPAEPCHYSCPREEEGSTIPIQEDYRKPEPACSPGSTSGSGKPGSSEGSTKGRVKFSRSADAPAYKQGQNQLYNELNLGRREEYDVLDKRRGRDPEMGGKPRRKNPQEGLYNELQKDKMAEAYSEIGMKGERRRGKGHDGLYQGLSTATKDTYDALHMQALPPRGSTSGSGKPGSSEGSTKGVGALESLRGNADLAYILSMEPCGHCLIINNVNFCRESGLRTRTGSNIDCEKLRRRFSSLHFMVEVKGDLTAKKMVLALLELAQQDHGALDCCVVVILSHGCQASHLQFPGAVYGTDGCPVSVEKIVNIFNGTSCPSLGGKPKLFFIQACGGEQKDHGFEVASTSPEDESPGSNPEPDATPFQEGLRTFDQLDAISSLPTPSDIFVSYSTFPGFVSWRDPKSGSWYVETLDDIFEQWAHSEDLQSLLLRVANAVSVKGIYKQMPGCFNFLRKKLFFKTSMGVQVETISPGDGRTFPKRGQTCVVHYTGMLEDGKKVDSSRDRNKPFKFMLGKQEVIRGWEEGVAQMSVGQRAKLTISPDYAYGATGHPGIIPPHATLVFDVELLKLE

SEQ ID NO: 7852 - protein, 504 aa, Artificial Sequence
  source: /note="Description of Artificial Sequence: Synthetic Chimeric Antigen Receptor"
MALPVTALLLPLALLLHAARPGSSRAAQPAMAQVQLQQSGAELVKPGASVKISCKASGYSFTGYFMNWVKQSHGKSLEWIGRIHPYDGDTFYNQNFKDKATLTVDKSSNTAHMELLSLTSEDFAVYYCTRYDGSRAMDYWGQGTTVTVSSGGGGSGGGGSGGGGSDIELTQSPASLAVSLGQRAIISCKASQSVSFAGTSLMHWYHQKPGQQPKLLIYRASNLEAGVPTRFSGSGSKTDFTLNIHPVEEEDAATYYCQQSREYPYTFGGGTKLEIKRAAASTTTPAPRPPTPAPTIASQPLSLRPEACRPAAGGAVHTRGLDFACDIYIWAPLAGTCGVLLLSLVITLYCKRGRKKLLYIFKQPFMRPVQTTQEEDGCSCRFPEEEEGGCELRVKFSRSADAPAYKQGQNQLYNELNLGRREEYDVLDKRRGRDPEMGGKPRRKNPQEGLYNELQKDKMAEAYSEIGMKGERRRGKGHDGLYQGLSTATKDTYDALHMQALPPR

SEQ ID NO: 7853 - protein, 491 aa, Artificial Sequence
  source: /note="Description of Artificial Sequence: Synthetic Chimeric Antigen Receptor"
MALPVTALLLPLALLLHAARPGSQLVESGGGLVQPGRSLRLSCTTSGFTFGDYAMIWARQAPGKGLEWVSSISSSSSYIYYADSVKGRFTISRDNAKNSLYLQMNSLRAEDTAVYYCARERYDFWSGMDVWGKGTTVTVSSGGGGSGGGGSGGSAQSALTQPASVSGSPGQSITISCTGTSSDVGSYNLVSWYQQHPGKAPKLMIYEGSKRPSGVSNRFSGSKSGNAASLTISGLQAEDEADYYCQSYDSSLSVVFGGGTKLTVLGASTTTPAPRPPTPAPTIASQPLSLRPEACRPAAGGAVHTRGLDFACDIYIWAPLAGTCGVLLLSLVITLYCKRGRKKLLYIFKQPFMRPVQTTQEEDGCSCRFPEEEEGGCELRVKFSRSADAPAYKQGQNQLYNELNLGRREEYDVLDKRRGRDPEMGGKPRRKNPQEGLYNELQKDKMAEAYSEIGMKGERRRGKGHDGLYQGLSTATKDTYDALHMQALPPR

SEQ ID NO: 7854 - protein, 504 aa, Artificial Sequence; identical to SEQ ID NO: 7852
  source: /note="Description of Artificial Sequence: Synthetic Chimeric Antigen Receptor"

SEQ ID NO: 7855 - protein, 491 aa, Artificial Sequence; identical to SEQ ID NO: 7853
  source: /note="Description of Artificial Sequence: Synthetic Chimeric Antigen Receptor"

SEQ ID NO: 7856 - protein, 450 aa, Artificial Sequence
  source: /note="Description of Artificial Sequence: Synthetic Chimeric Antigen Receptor"
MALPVTALLLPLALLLHAARPGSAEVQLVQSGAEVKKPGASVKVSCKASGYTFTSYAMHWVRQAPGQRLEWMGWINAGNGNTKYSQKFQGRVTITRDTSASTAYMELSSLRSEDTAVYYCARDISYGSFDYWGQGTLVTVSSGGGGSGGGGSGGGGSSSELTQDPAVSVALGQTVRITCQGDNLRSYYASWYRQKSGQAPVLVIYGKNNRPSGIPDRFSGSSSGNTASLTITAAQAEDEADYYCHSRKSRGNHLLFGGGTKLTVLGQASTTTPAPRPPTPAPTIASQPLSLRPEACRPAAGGAVHTRGLDFACDIYIWAPLAGTCGVLLLSLVITLYCRVKFSRSADAPAYQQGQNQLYNELNLGRREEYDVLDKRRGRDPEMGGKPRRKNPQEGLYNELQKDKMAEAYSEIGMKGERRRGKGHDGLYQGLSTATKDTYDALHMQALPPR

SEQ ID NO: 7857 - protein, 496 aa, Artificial Sequence
  source: /note="Description of Artificial Sequence: Synthetic Chimeric Antigen Receptor"
MALPVTALLLPLALLLHAARPGSAEVQLVQSGAEVKKPGASVKVSCKASGYTFTSYAMHWVRQAPGQRLEWMGWINAGNGNTKYSQKFQGRVTITRDTSASTAYMELSSLRSEDTAVYYCARDISYGSFDYWGQGTLVTVSSGGGGSGGGGSGGGGSSSELTQDPAVSVALGQTVRITCQGDNLRSYYASWYRQKSGQAPVLVIYGKNNRPSGIPDRFSGSSSGNTASLTITAAQAEDEADYYCHSRKSRGNHLLFGGGTKLTVLGQASTTTPAPRPPTPAPTIASQPLSLRPEACRPAAGGAVHTRGLDFACDFWVLVVVGGVLACYSLLVTVAFIIFWVRSKRSRLLHSDYMNMTPRRPGPTRKHYQPYAPPRDFAAYRSIDRVKFSRSADAPAYQQGQNQLYNELNLGRREEYDVLDKRRGRDPEMGGKPRRKNPQEGLYNELQKDKMAEAYSEIGMKGERRRGKGHDGLYQGLSTATKDTYDALHMQALPPR

SEQ ID NO: 7858 - protein, 450 aa, Artificial Sequence
  source: /note="Description of Artificial Sequence: Synthetic Chimeric Antigen Receptor"
MALPVTALLLPLALLLHAARPGSAEVQLVQSGAEVKKPGASVKVSCKASGYTFTSYAMHWVRQAPGQRLEWMGWINAGNGNTKYSQKFQGRVTITRDTSASTAYMELSSLRSEDTAVYYCARDISYGSFDYWGQGTLVTVSSGGGGSGGGGSGGGGSSSELTQDPAVSVALGQTVRITCQGDSLRSNYANWYQQKPGQAPVLVIYGQNNRPSGIPDRFSGSSSGNTASLTITGAQAADEADYYCDSRVSTGNHVVFGGGTKLTVLGQASTTTPAPRPPTPAPTIASQPLSLRPEACRPAAGGAVHTRGLDFACDIYIWAPLAGTCGVLLLSLVITLYCRVKFSRSADAPAYQQGQNQLYNELNLGRREEYDVLDKRRGRDPEMGGKPRRKNPQEGLYNELQKDKMAEAYSEIGMKGERRRGKGHDGLYQGLSTATKDTYDALHMQALPPR

SEQ ID NO: 7859 - protein, 498 aa, Artificial Sequence
  source: /note="Description of Artificial Sequence: Synthetic Chimeric Antigen Receptor"
MALPVTALLLPLALLLHAARPGSAEVQLVQSGAEVKKPGASVKVSCKASGYTFTSYAMHWVRQAPGQRLEWMGWINAGNGNTKYSQKFQGRVTITRDTSASTAYMELSSLRSEDTAVYYCARDISYGSFDYWGQGTLVTVSSGGGGSGGGGSGGGGSSSELTQDPAVSVALGQTVRITCQGDSLRSNYANWYQQKPGQAPVLVIYGQNNRPSGIPDRFSGSSSGNTASLTITGAQAADEADYYCDSRVSTGNHVVFGGGTKLTVLGQASTTTPAPRPPTPAPTIASQPLSLRPEACRPAAGGAVHTRGLDFACDIYIWAPLAGTCGVLLLSLVITLYCRVRKYRSNKGESPVEPAEPCRYSCPREEEGSTIPIQEDYRKPEPACSPRVKFSRSADAPAYQQGQNQLYNELNLGRREEYDVLDKRRGRDPEMGGKPRRKNPQEGLYNELQKDKMAEAYSEIGMKGERRRGKGHDGLYQGLSTATKDTYDALHMQALPPR

SEQ ID NO: 7860 - protein, 496 aa, Artificial Sequence
  source: /note="Description of Artificial Sequence: Synthetic Chimeric Antigen Receptor"
MALPVTALLLPLALLLHAARPGSAEVQLVQSGAEVKKPGASVKVSCKASGYTFTSYAMHWVRQAPGQRLEWMGWINAGNGNTKYSQKFQGRVTITRDTSASTAYMELSSLRSEDTAVYYCARDISYGSFDYWGQGTLVTVSSGGGGSGGGGSGGGGSSSELTQDPAVSVALGQTVRITCQGDSLRSNYANWYQQKPGQAPVLVIYGQNNRPSGIPDRFSGSSSGNTASLTITGAQAADEADYYCDSRVSTGNHVVFGGGTKLTVLGQASTTTPAPRPPTPAPTIASQPLSLRPEACRPAAGGAVHTRGLDFACDFWVLVVVGGVLACYSLLVTVAFIIFWVRSKRSRLLHSDYMNMTPRRPGPTRKHYQPYAPPRDFAAYRSIDRVKFSRSADAPAYQQGQNQLYNELNLGRREEYDVLDKRRGRDPEMGGKPRRKNPQEGLYNELQKDKMAEAYSEIGMKGERRRGKGHDGLYQGLSTATKDTYDALHMQALPPR

SEQ ID NO: 7861 - protein, 492 aa, Artificial Sequence
  source: /note="Description of Artificial Sequence: Synthetic Chimeric Antigen Receptor"
MALPVTALLLPLALLLHAARPGSAEVQLVQSGAEVKKPGASVKVSCKASGYTFTSYAMHWVRQAPGQRLEWMGWINAGNGNTKYSQKFQGRVTITRDTSASTAYMELSSLRSEDTAVYYCARDISYGSFDYWGQGTLVTVSSGGGGSGGGGSGGGGSSSELTQDPAVSVALGQTVRITCQGDSLRSNYANWYQQKPGQAPVLVIYGQNNRPSGIPDRFSGSSSGNTASLTITGAQAADEADYYCDSRVSTGNHVVFGGGTKLTVLGQASTTTPAPRPPTPAPTIASQPLSLRPEACRPAAGGAVHTRGLDFACDIYIWAPLAGTCGVLLLSLVITLYCRVGRKKLLYIFKQPFMRPVQTTQEEDGCSCRFPEEEEGGCELRVKFSRSADAPAYQQGQNQLYNELNLGRREEYDVLDKRRGRDPEMGGKPRRKNPQEGLYNELQKDKMAEAYSEIGMKGERRRGKGHDGLYQGLSTATKDTYDALHMQALPPR

SEQ ID NO: 7862 - protein, 466 aa, Artificial Sequence
  source: /note="Description of Artificial Sequence: Synthetic Chimeric Antigen Receptor"
DAVVTQESALTSSPGETVTLTCRSSTGAVTISNVASWVQEKPDHLFTGLIGGTNNRAPGVPARFSGSLIGDKAALTITGAQTEDEAIYFCVLWYSDHWVFGGGTKLTVLGGGGGSGGGGSGGGGSGGGGSDVQLQESGPGLVAPSQSLSITCTVSGFLLTDVGVNWVRQSPGKGLEWLGVIWGDGITDYNSALKSRLSVTKDNSKSQVFLKMNSLQSGDSARVYCVTGLFDYWGQGTTLTVSSTTTPAPRPPTPAPTIASQPLSLRPEACRPAAGGAVHTRGLDFACDIYIWAPLAGTCGVLLLSLVITLVCKRGRKKLLYIFKQPFMRPVQTTQEEDGCSCRFPEEEEGGCELRVKFSRSADAPAYKQGQNQLYNELNLGRREEYDVLDKRRGRDPEMGGKPRRKNPQEGLYNELQKDKMAEAVSEIGMKGERRRGKGHDGLYQGLSTATKDTYDALHMQALPPR

SEQ ID NO: 7863 - protein, 434 aa, Artificial Sequence
  source: /note="Description of Artificial Sequence: Synthetic Chimeric Antigen Receptor"
DAVVTQESALTSSPGETVTLTCRSSTGAVTISNVASWVQEKPDHLFTGLIGGTNNRAPGVPARFSGSLIGDKAALTITGAQTEDEAIYFCVLWYSDHWVFGGGTKLTVLGGGGGSGGGGSGGGGSGGGGSDVQLQESGPGLVAPSQSLSITCTVSGFLLTDVGVNWVRQSPGKGLEWLGVIWGDGITDYNSALKSRLSVTKDNSKSQVFLKMNSLQSGDSARYVCVTGLFDYWGQGTTLTVSSESKVGPPCPPCPDIYIWAPLAGTCGVLLLSLVITLVCKRGRKKLLYIFKQPFMRPVQTTQEEDGCSCRFPEEEEGGCELRVKFSRSADAPAYKQGQNQLYNELNLGRREEYDVLDKRRGRDPEMGGKPRRKNPQEGLYNELQKDKMAEAVSEIGMKGERRRGKGHDGLYQGLSTATKDTYDALHMQALPPR

SEQ ID NO: 7864 - protein, 719 aa, Artificial Sequence
  source: /note="Description of Artificial Sequence: Synthetic Chimeric Antigen Receptor"
METDTLLLWVLLLWVPGSTGQVQLKESGPVLVAPSQTLSITCTVSGFSLASYNIHWVRQPPGKGLEWLGVIWAGGSTNYNSALMSRLSISKDNSKSQVFLQMNSLQTDDTAMYYCAKRSDDYSWFAYWGQGTLVTVSASGGGGSGGGGSGGGGSENVLTQSPAIMSASPGEKVTMTCRASSSVSSSYLHWYQQKSGASPKVWIYSTSNLASGVPGRFSGSGSGTSYSLTISSVEAEDAATYYCQQYSGYPITFGAGTKVEVKRSDPAEPKSPDKTHTCPPCPAPELLGGPSVFLFPPKPKDTLMISRTPEVTCVVVDVSHEDPEVKFNWYVDGVEVHNAKTKPREEQYNSTYRVVSVLTVLHQDWLNGKEYKCKVSNKALPAPIEKTISKAKGQPREPQVYTLPPSRDELTKNQVSLTCLVKGFYPSDIAVEWESNGQPENNYKTTPPVLDSDGSFFLYSKLTVDKSRWQQGNVFSCSVMHEALHNHYTQKSLSLSPGKKDPKFWVLVVVGGVLACYSLLVTVAFIIFWVRSKRSRLLHSDYMNMTPRRPGPTRKHYQPYAPPRDFAAYRSRDQRLPPDAHKPPGGGSFRTPIQEEQADAHSTLAKIRVKFSRSADAPAYQQGQNQLYNELNLGRREEYDVLDKRRGRDPEMGGKPRRKNPQEGLYNELQKDKMAEAYSEIGMKGERRRGKGHDGLYQGLSTATKDTYDALHMQALPPR

SEQ ID NO: 7865 - protein, 718 aa, Artificial Sequence
  source: /note="Description of Artificial Sequence: Synthetic Chimeric Antigen Receptor"
METDTLLLWVLLLWVPGSTGQVQLQESGPGLVKPSQTLSITCTVSGFSLASYNIHWVRQPPGKGLEWLGVIWAGGSTNYNSALMSRLTISKDNSKNQVFLKMSSLTAADTAVYYCAKRSDDYSWFAYWGQGTLVTVSSGGGGSGGGGSGGGGSENQMTQSPSSLSASVGDRVTMTCRASSSVSSSYLHWYQQKSGKAPKVWIYSTSNLASGVPSRFSGSGSGTDYTLTISSLQPEDFATYYCQQYSGYPITFGQGTKVEIKRSDPAEPKSPDKTHTCPPCPAPELLGGPSVFLFPPKPKDTLMISRTPEVTCVVVDVSHEDPEVKFNWYVDGVEVHNAKTKPREEQYNSTYRVVSVLTVLHQDWLNGKEYKCKVSNKALPAPIEKTISKAKGQPREPQVYTLPPSRDELTKNQVSLTCLVKGFYPSDIAVEWESNGQPENNYKTTPPVLDSDGSFFLYSKLTVDKSRWQQGNVFSCSVMHEALHNHYTQKSLSLSPGKKDPKFWVLVVVGGVLACYSLLVTVAFIIFWVRSKRSRLLHSDYMNMTPRRPGPTRKHYQPYAPPRDFAAYRSRDQRLPPDAHKPPGGGSFRTPIQEEQADAHSTLAKIRVKFSRSADAPAYQQGQNQLYNELNLGRREEYDVLDKRRGRDPEMGGKPRRKNPQEGLYNELQKDKMAEAYSEIGMKGERRRGKGHDGLYQGLSTATKDTYDALHMQALPPR

SEQ ID NO: 7866 - protein, 717 aa, Artificial Sequence
  source: /note="Description of Artificial Sequence: Synthetic Chimeric Antigen Receptor"
METDTLLLWVLLLWVPGSTGQVQLQESGPGLVKPSQTLSITCTVSGFSLASYNIHWVRQPPGKGLEWLGVIWAGGSTNYNSALMSRLTISKDNSKNQVFLKMSSLTAADTAVYYCAKRSDDYSWFAYWGQGTLVTVSSGGGGSGGGGSGGGGSENQMTQSPSSLSASVGDRVTMTCRASSSVSSSYLHWYQQKSGKAPKVWIYSTSNLASGVPSRFSGSGSGTDYTLTISSLQPEDFATYYCQQYSGYPITFGQGTKVEIKRSDPAEPKSPDKTHTCPPCPAPPVAGPSVFLFPPKPKDTLMIARTPEVTCVVVDVSHEDPEVKFNWYVDGVEVHNAKTKPREEQYNSTYRVVSVLTVLHQDWLNGKEYKCKVSNKALPAPIEKTISKAKGQPREPQVYTLPPSRDELTKNQVSLTCLVKGFYPSDIAVEWESNGQPENNYKTTPPVLDSDGSFFLYSKLTVDKSRWQQGNVFSCSVMHEALHNHYTQKSLSLSPGKKDPKFWVLVVVGGVLACYSLLVTVAFIIFWVRSKRSRLLHSDYMNMTPRRPGPTRKHYQPYAPPRDFAAYRSRDQRLPPDAHKPPGGGSFRTPIQEEQADAHSTLAKIRVKFSRSADAPAYQQGQNQLYNELNLGRREEYDVLDKRRGRDPEMGGKPRRKNPQEGLYNELQKDKMAEAYSEIGMKGERRRGKGHDGLYQGLSTATKDTYDALHMQALPPR

SEQ ID NO: 7867 - protein, 527 aa, Artificial Sequence
  source: /note="Description of Artificial Sequence: Synthetic Chimeric Antigen Receptor"
METDTLLLWVLLLWVPGSTGQVQLQESGPGLVKPSQTLSITCTVSGFSLASYNIHWVRQPPGKGLEWLGVIWAGGSTNYNSALMSRLTISKDNSKNQVFLKMSSLTAADTAVYYCAKRSDDYSWFAYWGQGTLVTVSSGGGGSGGGGSGGGGSENQMTQSPSSLSASVGDRVTMTCRASSSVSSSYLHWYQQKSGKAPKVWIYSTSNLASGVPSRFSGSGSGTDYTLTISSLQPEDFATYYCQQYSGYPITFGQGTKVEIKRSDPTTTPAPRPPTPAPTIASQPLSLRPEACRPAAGGAVHTRGLDFACDIFWVLVVVGGVLACYSLLVTVAFIIFWVRSKRSRLLHSDYMNMTPRRPGPTRKHYQPYAPPRDFAAYRSRDQRLPPDAHKPPGGGSFRTPIQEEQADAHSTLAKIRVKFSRSADAPAYQQGQNQLYNELNLGRREEYDVLDKRRGRDPEMGGKPRRKNPQEGLYNELQKDKMAEAYSEIGMKGERRRGKGHDGLYQGLSTATKDTYDALHMQALPPR

SEQ ID NO: 7868 - protein, 527 aa, Artificial Sequence; identical to SEQ ID NO: 7867
  source: /note="Description of Artificial Sequence: Synthetic Chimeric Antigen Receptor"

SEQ ID NO: 7869 - protein, 501 aa, Artificial Sequence
  source: /note="Description of Artificial Sequence: Synthetic Chimeric Antigen Receptor"
METDTLLLWVLLLWVPGSTGQVQLQESGPGLVKPSQTLSITCTVSGFSLASYNIHWVRQPPGKGLEWLGVIWAGGSTNYNSALMSRLTISKDNSKNQVFLKMSSLTAADTAVYYCAKRSDDYSWFAYWGQGTLVTVSSGGGGSGGGGSGGGGSENQMTQSPSSLSASVGDRVTMTCRASSSVSSSYLHWYQQKSGKAPKVWIYSTSNLASGVPSRFSGSGSGTDYTLTISSLQPEDFATYYCQQYSGYPITFGQGTKVEIKRSDPAEPKSPDKTHTCPPCPKDPKFWVLVVVGGVLACYSLLVTVAFIIFWVRSKRSRLLHSDYMNMTPRRPGPTRKHYQPYAPPRDFAAYRSRDQRLPPDAHKPPGGGSFRTPIQEEQADAHSTLAKIRVKFSRSADAPAYQQGQNQLYNELNLGRREEYDVLDKRRGRDPEMGGKPRRKNPQEGLYNELQKDKMAEAYSEIGMKGERRRGKGHDGLYQGLSTATKDTYDALHMQALPPR

SEQ ID NO: 7870 - protein, 642 aa, Artificial Sequence
  source: /note="Description of Artificial Sequence: Synthetic Chimeric Antigen Receptor"
METDTLLLWVLLLWVPGSTGQVQLQESGPGLVKPSQTLSITCTVSGFSLASYNIHWVRQPPGKGLEWLGVIWAGGSTNYNSALMSRLTISKDNSKNQVFLKMSSLTAADTAVYYCAKRSDDYSWFAYWGQGTLVTVSSGGGGSGGGGSGGGGSENQMTQSPSSLSASVGDRVTMTCRASSSVSSSYLHWYQQKSGKAPKVWIYSTSNLASGVPSRFSGSGSGTDYTLTISSLQPEDFATYYCQQYSGYPITFGQGTKVEIKRSDPAEPKSPDKTHTCPPCPAPPVAGPSVFLFPPKPKDTLMIARTPEVTCVVVDVSHEDPEVKFNWYVDGVEVHNAKTKPREEQYNSTYRVVSVLTVLHQDWLNGKEYKCKVSNKALPAPIEKTISKAKGQPREPQVYTLPPSRDELTKNQVSLTCLVKGFYPSDIAVEWESNGQPENNYKTTPPVLDSDGSFFLYSKLTVDKSRWQQGNVFSCSVMHEALHNHYTQKSLSLSPGKKDPKFWVLVVVGGVLACYSLLVTVAFIIFWVRSRVKFSRSADAPAYQQGQNQLYNELNLGRREEYDVLDKRRGRDPEMGGKPRRKNPQEGLYNELQKDKMAEAYSEIGMKGERRRGKGHDGLYQGLSTATKDTYDALHMQALPPR

SEQ ID NO: 7871 - protein, 681 aa, Artificial Sequence
  source: /note="Description of Artificial Sequence: Synthetic Chimeric Antigen Receptor"
METDTLLLWVLLLWVPGSTGQVQLQESGPGLVKPSQTLSITCTVSGFSLASYNIHWVRQPPGKGLEWLGVIWAGGSTNYNSALMSRLTISKDNSKNQVFLKMSSLTAADTAVYYCAKRSDDYSWFAYWGQGTLVTVSSGGGGSGGGGSGGGGSENQMTQSPSSLSASVGDRVTMTCRASSSVSSSYLHWYQQKSGKAPKVWIYSTSNLASGVPSRFSGSGSGTDYTLTISSLQPEDFATYYCQQYSGYPITFGQGTKVEIKRSDPAEPKSPDKTHTCPPCPAPPVAGPSVFLFPPKPKDTLMIARTPEVTCVVVDVSHEDPEVKFNWYVDGVEVHNAKTKPREEQYNSTYRVVSVLTVLHQDWLNGKEYKCKVSNKALPAPIEKTISKAKGQPREPQVYTLPPSRDELTKNQVSLTCLVKGFYPSDIAVEWESNGQPENNYKTTPPVLDSDGSFFLYSKLTVDKSRWQQGNVFSCSVMHEALHNHYTQKSLSLSPGKKDPKFWVLVVVGGVLACYSLLVTVAFIIFWVRSKRSRLLHSDYMNMTPRRPGPTRKHYQPYAPPRDFAAYRSRVKFSRSADAPAYQQGQNQLYNELNLGRREEYDVLDKRRGRDPEMGGKPRRKNPQEGLYNELQKDKMAEAYSEIGMKGERRRGKGHDGLYQGLSTATKDTYDALHMQALPPR

SEQ ID NO: 7872 - protein, 1103 aa, Artificial Sequence
  source: /note="Description of Artificial Sequence: Synthetic Chimeric Antigen Receptor"
MLEGVQVETISPGDGRTFPKRGQTCVVHYTGMLEDGKKVDSSRDRNKPFKFMLGKQEVIRGWEEGVAQMSVGQRAKLTISPDYAYGATGHPGIIPPHATLVFDVELLKLESGGGSGVDGFGDVGALESLRGNADLAYILSMEPCGHCLIINNVNFCRESGLRTRTGSNIDCEKLRRRFSSLHFMVEVKGDLTAKKMVLALLELAQQDHGALDCCVVVILSHGCQASHLQFPGAVYGTDGCPVSVEKIVNIFNGTSCPSLGGKPKLFFIQACGGEQKDHGFEVASTSPEDESPGSNPEPDATPFQEGLRTFDQLDAISSLPTPSDIFVSYSTFPGFVSWRDPKSGSWYVETLDDIFEQWAHSEDLQSLLLRVANAVSVKGIYKQMPGCFNFLRKKLFFKTSASRAEGRGSLLTCGDVEENPGPMETDTLLLWVLLLWVPGSTGQVQLQESGPGLVKPSQTLSITCTVSGFSLASYNIHWVRQPPGKGLEWLGVIWAGGSTNYNSALMSRLTISKDNSKNQVFLKMSSLTAADTAVYYCAKRSDDYSWFAYWGQGTLVTVSSGGGGSGGGGSGGGGSENQMTQSPSSLSASVGDRVTMTCRASSSVSSSYLHWYQQKSGKAPKVWIYSTSNLASGVPSRFSGSGSGTDYTLTISSLQPEDFATYYCQQYSGYPITFGQGTKVEIKRSDPAEPKSPDKTHTCPPCPAPPVAGPSVFLFPPKPKDTLMIARTPEVTCVVVDVSHEDPEVKFNWYVDGVEVHNAKTKPREEQYNSTYRVVSVLTVLHQDWLNGKEYKCKVSNKALPAPIEKTISKAKGQPREPQVYTLPPSRDELTKNQVSLTCLVKGFYPSDIAVEWESNGQPENNYKTTPPVLDSDGSFFLYSKLTVDKSRWQQGNVFSCSVMHEALHNHYTQKSLSLSPGKKDPKFWVLVVVGGVLACYSLLVTVAFIIFWVRSKRSRLLHSDYMNMTPRRPGPTRKHYQPYAPPRDFAAYRSRVKFSRSADAPAYQQGQNQLYNELNLGRREEYDVLDKRRGRDPEMGGKPRRKNPQEGLYNELQKDKMAEAYSEIGMKGERRRGKGHDGLYQGLSTATKDTYDALHMQALPPR

SEQ ID NO: 7873 - protein, 858 aa, Artificial Sequence
  source: /note="Description of Artificial Sequence: Synthetic Chimeric Antigen Receptor"
MGTSLLCWMALCLLGADHADACPYSNPSLCSGGGGSELPTQGTFSNVSTNVSPAKPTTTACPYSNPSLCSGGGGSPAPRPPTPAPTIASQPLSLRPEACRPAAGGAVHTRGLDFACDIYIWAPLAGTCGVLLLSLVITLYCNHRNRRRVCKCPRPVVRAEGRGSLLTCGDVEENPGPMETDTLLLWVLLLWVPGSTGQVQLQESGPGLVKPSQTLSITCTVSGFSLASYNIHWVRQPPGKGLEWLGVIWAGGSTNYNSALMSRLTISKDNSKNQVFLKMSSLTAADTAVYYCAKRSDDYSWFAYWGQGTLVTVSSGGGGSGGGGSGGGGSENQMTQSPSSLSASVGDRVTMTCRASSSVSSSYLHWYQQKSGKAPKVWIYSTSNLASGVPSRFSGSGSGTDYTLTISSLQPEDFATYYCQQYSGYPITFGQGTKVEIKRSDPAEPKSPDKTHTCPPCPAPPVAGPSVFLFPPKPKDTLMIARTPEVTCVVVDVSHEDPEVKFNWYVDGVEVHNAKTKPREEQYNSTYRVVSVLTVLHQDWLNGKEYKCKVSNKALPAPIEKTISKAKGQPREPQVYTLPPSRDELTKNQVSLTCLVKGFYPSDIAVEWESNGQPENNYKTTPPVLDSDGSFFLYSKLTVDKSRWQQGNVFSCSVMHEALHNHYTQKSLSLSPGKKDPKFWVLVVVGGVLACYSLLVTVAFIIFWVRSKRSRLLHSDYMNMTPRRPGPTRKHYQPYAPPRDFAAYRSRVKFSRSADAPAYQQGQNQLYNELNLGRREEYDVLDKRRGRDPEMGGKPRRKNPQEGLYNELQKDKMAEAYSEIGMKGERRRGKGHDGLYQGLSTATKDTYDALHMQALPPR

SEQ ID NO: 7874 - protein, 402 aa, Artificial Sequence
  source: /note="Description of Artificial Sequence: Synthetic Chimeric Antigen Receptor"
MLEGVQVETISPGDGRTFPKRGQTCVVHYTGMLEDGKKVDSSRDRNKPFKFMLGKQEVIRGWEEGVAQMSVGQRAKLTISPDYAYGATGHPGIIPPHATLVFDVELLKLESGGGSGVDGFGDVGALESLRGNADLAYILSMEPCGHCLIINNVNFCRESGLRTRTGSNIDCEKLRRRFSSLHFMVEVKGDLTAKKMVLALLELAQQDHGALDCCVVVILSHGCQASHLQFPGAVYGTDGCPVSVEKIVNIFNGTSCPSLGGKPKLFFIQACGGEQKDHGFEVASTSPEDESPGSNPEPDATPFQEGLRTFDQLDAISSLPTPSDIFVSYSTFPGFVSWRDPKSGSWYVETLDDIFEQWAHSEDLQSLLLRVANAVSVKGIYKQMPGCFNFLRKKLFFKTSAS

SEQ ID NO: 7875 - protein, 157 aa, Artificial Sequence
  source: /note="Description of Artificial Sequence: Synthetic Chimeric Antigen Receptor"
MGTSLLCWMALCLLGADHADACPYSNPSLCSGGGGSELPTQGTFSNVSTNVSPAKPTTTACPYSNPSLCSGGGGSPAPRPPTPAPTIASQPLSLRPEACRPAAGGAVHTRGLDFACDIYIWAPLAGTCGVLLLSLVITLYCNHRNRRRVCKCPRPVV

SEQ ID NO: 7876 - protein, 422 aa, Artificial Sequence
  source: /note="Description of Artificial Sequence: Synthetic Chimeric Antigen Receptor"
DVVMTQSPLSLPVTPGEPASISCRSSQSLVHSNANTYLHWYLQKPGQSPQLLIYKVSNRFSGVPDRFSGSGSGTDFTLKISRVEAEDVGVYYCSQNTHVPPTFGQGTKLEIKRGGGGSGGGGSGGGGSQVQLVQSGAEVKKPGASVKVSCKASGYTFTDYEMHWVRQAPGQGLEWMGALDPKTGDTAYSQKFKGRVTLTADESTSTAYMELSSLRSEDTAVYYCTRFYSYTYWGQGTLVTVSSTTTPAPRPPTPAPTIASQPLSLRPEACRPAAGGAVHTRGLDFACDIYIWAPLAGTCGVLLLSLVITRVKFSRSADAPAYQQGQNQLYNELNLGRREEYDVLDKRRGRDPEMGGKPQRRKNPQEGLYNELQKDKMAEAYSEIGMKGERRRGKGHDGLYQGLSTATKDTYDALHMQALPPR

SEQ ID NO: 7877 - protein, 892 aa, Artificial Sequence
  source: /note="Description of Artificial Sequence: Synthetic Chimeric Antigen Receptor"
QVQLVESGPGVVQPGRSLRISCAVSGFSVTNYGVHWVRQPPGKGLEWLGVIWAGGITNYNSAFMSRLTISKDNSKNTVYLQMNSLRAEDTAMYYCASRGGHYGYALDYWGQGTLVTVSSGSTSGSGKPGSSEGSTKGEIVMTQTPATLSVSAGERVTITCKASQSVSNDVTWYQQKPGQAPRLLIYSASNRYSGVPARFSGSGYGTEFTFTISSVQSEDFAVYFCQQDYSSFGQGTKLEIKFWVLVVVGGVLACYSLLVTVAFIIFWVKRGRKKLLYIFKQPFMRPVQTTQEEDGCSCRFPEEEEGGCELQRRKYRSNKGESPVEPAEPCHYSCPREEEGSTIPIQEDYRKPEPACSPGSTSGSGKPGSSEGSTKGRVKFSRSADAPAYKQGQNQLYNELNLGRREEYDVLDKRRGRDPEMGGKPRRKNPQEGLYNELQKDKMAEAYSEIGMKGERRRGKGHDGLYQGLSTATKDTYDALHMQALPPRGSTSGSGKPGSSEGSTKGVGALESLRGNADLAYILSMEPCGHCLIINNVNFCRESGLRTRTGSNIDCEKLRRRFSSLHFMVEVKGDLTAKKMVLALLELAQQDHGALDCCVVVILSHGCQASHLQFPGAVYGTDGCPVSVEKIVNIFNGTSCPSLGGKPKLFFIQACGGEQKDHGFEVASTSPEDESPGSNPEPDATPFQEGLRTFDQLDAISSLPTPSDIFVSYSTFPGFVSWRDPKSGSWYVETLDDIFEQWAHSEDLQSLLLRVANAVSVKGIYKQMPGCFNFLRKKLFFKTSMGVQVETISPGDGRTFPKRGQTCVVHYTGMLEDGKKVDSSRDRNKPFKFMLGKQEVIRGWEEGVAQMSVGQRAKLTISPDYAYGATGHPGIIPPHATLVFDVELLKLE

SEQ ID NO: 7878 - protein, 900 aa, Artificial Sequence
  source: /note="Description of Artificial Sequence: Synthetic Chimeric Antigen Receptor"
EVKLVESGGGLVLPGDSLRLSCATSEFTFTDYYMTWVRQPPRKALEWLGFIRNRANGYTTEYNPSVKGRFTISRDNSQSILYLQMNTLRTEDSATYYCARVSNWAFDYWGQGTTLTVSSGSTSGSGKPGSSEGSTKGDVVMTQTPLSLPVSLGDQASISCRSSQSLLKNNGNTFLHWYLQKSGQSPKLLIYKVSNRLSGVPDRFSGSGSGTYFTLKISRVEAEDLGVYFCSQSTHIPYTFGGGTKLEIKFWVLVVVGGVLACYSLLVTVAFIIFWVKRGRKKLLYIFKQPFMRPVQTTQEEDGCSCRFPEEEEGGCELQRRKYRSNKGESPVEPAEPCHYSCPREEEGSTIPIQEDYRKPEPACSPGSTSGSGKPGSSEGSTKGRVKFSRSADAPAYKQGQNQLYNELNLGRREEYDVLDKRRGRDPEMGGKPRRKNPQEGLYNELQKDKMAEAYSEIGMKGERRRGKGHDGLYQGLSTATKDTYDALHMQALPPRGSTSGSGKPGSSEGSTKGVGALESLRGNADLAYILSMEPCGHCLIINNVNFCRESGLRTRTGSNIDCEKLRRRFSSLHFMVEVKGDLTAKKMVLALLELAQQDHGALDCCVVVILSHGCQASHLQFPGAVYGTDGCPVSVEKIVNIFNGTSCPSLGGKPKLFFIQACGGEQKDHGFEVASTSPEDESPGSNPEPDATPFQEGLRTFDQLDAISSLPTPSDIFVSYSTFPGFVSWRDPKSGSWYVETLDDIFEQWAHSEDLQSLLLRVANAVSVKGIYKQMPGCFNFLRKKLFFKTSMGVQVETISPGDGRTFPKRGQTCVVHYTGMLEDGKKVDSSRDRNKPFKFMLGKQEVIRGWEEGVAQMSVGQRAKLTISPDYAYGATGHPGIIPPHATLVFDVELLKLE

SEQ ID NO: 7879 - protein, 895 aa, Artificial Sequence
  source: /note="Description of Artificial Sequence: Synthetic Chimeric Antigen Receptor"
EVQLVQSGAEVEKPGASVKISCKASGSSFTGYNMNWVRQNIGKSLEWIGAIDPYYGGTSYNQKFKGRATLTVDKSTSTAYMHLKSLRSEDTAVYYCVSGMEYWGQGTSVTVSSGSTSGSGKPGSSEGSTKGDVVMTQTPLSLPVTPGEPASISCRSSQSLVHRNGNTYLHWYLQKPGQSPKLLIHKVSNRFSGVPDRFSGSGSGTDFTLKISRVEAEDLGVYFCSQSTHVPPLTFGAGTKLELKFWVLVVVGGVLACYSLLVTVAFIIFWVKRGRKKLLYIFKQPFMRPVQTTQEEDGCSCRFPEEEEGGCELQRRKYRSNKGESPVEPAEPCHYSCPREEEGSTIPIQEDYRKPEPACSPGSTSGSGKPGSSEGSTKGRVKFSRSADAPAYKQGQNQLYNELNLGRREEYDVLDKRRGRDPEMGGKPRRKNPQEGLYNELQKDKMAEAYSEIGMKGERRRGKGHDGLYQGLSTATKDTYDALHMQALPPRGSTSGSGKPGSSEGSTKGVGALESLRGNADLAYILSMEPCGHCLIINNVNFCRESGLRTRTGSNIDCEKLRRRFSSLHFMVEVKGDLTAKKMVLALLELAQQDHGALDCCVVVILSHGCQASHLQFPGAVYGTDGCPVSVEKIVNIFNGTSCPSLGGKPKLFFIQACGGEQKDHGFEVASTSPEDESPGSNPEPDATPFQEGLRTFDQLDAISSLPTPSDIFVSYSTFPGFVSWRDPKSGSWYVETLDDIFEQWAHSEDLQSLLLRVANAVSVKGIYKQMPGCFNFLRKKLFFKTSMGVQVETISPGDGRTFPKRGQTCVVHYTGMLEDGKKVDSSRDRNKPFKFMLGKQEVIRGWEEGVAQMSVGQRAKLTISPDYAYGATGHPGIIPPHATLVFDVELLKLE

SEQ ID NO: 7880 - protein, 456 aa, Artificial Sequence
  source: /note="Description of Artificial Sequence: Synthetic Chimeric Antigen Receptor"
MALPVTALLLPLALLLHAARPDVQLVESGGGLVQPGGSRKLSCAASGFTFSNFGMHWVRQAPEKGLEWVAYISSGGSSINYADTVKGRFTISRDNPKNTLFLQMTSLRSEDTAIYYCTRGGTGTRSLYYFDYWGQGATLIVGGGGSGGGGSGGGGSDIQMTQITSSLSVSLGDRVIISCRASQDIGNFLNWYQQKPDGSLKLLIYYTSRLQSGVPSRFSGWGSGTDYSLTISNLEEEDIATFFCQQGKTLPYTFGGGTKLEIKGLAVSTISSFFPPGYQIYIWAPLAGTCGVLLLSLVITLYCKRGRKKLLYIFKQPFMRPVQTTQEEDGCSCRFPEEEEGGCELRVKFSRSADAPAYQQGQNQLYNELNLGRREEYDVLDKRRGRDPEMGGKPRRKNPQEGLYNELQKDKMAEAYSEIGMKGERRRGKGHDGLYQGLSTATKDTYDALHMQALPP

SEQ ID NO: 7881 - protein, 486 aa, Artificial Sequence
  source: /note="Description of Artificial Sequence: Synthetic Chimeric Antigen Receptor"
MALPVTALLLPLALLLHAARPDVQLVESGGGLVQPGGSRKLSCAASGFTFSNFGMHWVRQAPEKGLEWVAYISSGGSSINYADTVKGRFTISRDNPKNTLFLQMTSLRSEDTAIYYCTRGGTGTRSLYYFDYWGQGATLIVGGGGSGGGGSGGGGSDIQMTQITSSLSVSLGDRVIISCRASQDIGNFLNWYQQKPDGSLKLLIYYTSRLQSGVPSRFSGWGSGTDYSLTISNLEEEDIATFFCQQGKTLPYTFGGGTKLEIKTTTPAPRPPTPAPTIASQPLSLRPEACRPAAGGAVHTRGLDFACDIYIWAPLAGTCGVLLLSLVITLYCKRGRKKLLYIFKQPFMRPVQTTQEEDGCSCRFPEEEEGGCELRVKFSRSADAPAYQQGQNQLYNELNLGRREEYDVLDKRRGRDPEMGGKPRRKNPQEGLYNELQKDKMAEAYSEIGMKGERRRGKGHDGLYQGLSTATKDTYDALHMQALPPR

SEQ ID NO: 7882 - protein, 672 aa, Artificial Sequence
  source: /note="Description of Artificial Sequence: Synthetic Chimeric Antigen Receptor"
MALPVTALLLPLALLLHAARPDVQLVESGGGLVQPGGSRKLSCAASGFTFSNFGMHWVRQAPEKGLEWVAYISSGGSSINYADTVKGRFTISRDNPKNTLFLQMTSLRSEDTAIYYCTRGGTGTRSLYYFDYWGQGATLIVGGGGSGGGGSGGGGSDIQMTQITSSLSVSLGDRVIISCRASQDIGNFLNWYQQKPDGSLKLLIYYTSRLQSGVPSRFSGWGSGTDYSLTISNLEEEDIATFFCQQGKTLPYTFGGGTKLEIKEPKSPDKTHTCPPCPAPPVAGPSVFLFPPKPKDTLMIARTPEVTCVVVDVSHEDPEVKFNWYVDGVEVHNAKTKPREEQYNSTYRVVSVLTVLHQDWLNGKEYKCKVSNKALPAPIEKTISKAKGQPREPQVYTLPPSRDELTKNQVSLTCLVKGFYPSDIAVEWESNGQPENNYKTTPPVLDSDGSFFLYSKLTVDKSRWQQGNVFSCSVMHEALHNHYTQKSLSLSPGKIYIWAPLAGTCGVLLLSLVITLYCKRGRKKLLYIFKQPFMRPVQTTQEEDGCSCRFPEEEEGGCELRVKFSRSADAPAYQQGQNQLYNELNLGRREEYDVLDKRRGRDPEMGGKPRRKNPQEGLYNELQKDKMAEAYSEIGMKGERRRGKGHDGLYQGLSTATKDTYDALHMQALPPR

SEQ ID NO: 7883 - protein, 459 aa, Artificial Sequence
  source: /note="Description of Artificial Sequence: Synthetic Chimeric Antigen Receptor"
MALPVTALLLPLALLLHAARPEVVVVESGGGFVKPGGSLKLSCAAAGFTFSRYAMSWVRQTPEKRLEWVATISSGGSHTYYPDSVKGRFTISRDNAKNTLYLQMSSLRSEDTAIYYCARPGYDRGAWFFDVWGAGTTVTVSSGGGGSGGGGSGGGGSDIVLTQSPATLSVTPGDSVSLSCRASQIISNNLHWYQQKSHESPRLLIKYASQSISGIPSRFSGSGSGTDFTLSINSVETEDFGMYFCQQSNSWPLTFGSGTKLEIKRGLAVSTISSFFPPGYQIYIWAPLAGTCGVLLLSLVITLYCKRGRKKLLYIFKQPFMRPVQTTQEEDGCSCRFPEEEEGGCELRVKFSRSADAPAYQQGQNQLYNELNLGRREEYDVLDKRRGRDPEMGGKPRRKNPQEGLYNELQKDKMAEAYSEIGMKGERRRGKGHDGLYQGLSTATKDTYDALHMQALPPR

SEQ ID NO: 7884 - protein, 488 aa, Artificial Sequence
  source: /note="Description of Artificial Sequence: Synthetic Chimeric Antigen Receptor"
MALPVTALLLPLALLLHAARPEVVVVESGGGFVKPGGSLKLSCAAAGFTFSRYAMSWVRQTPEKRLEWVATISSGGSHTYYPDSVKGRFTISRDNAKNTLYLQMSSLRSEDTAIYYCARPGYDRGAWFFDVWGAGTTVTVSSGGGGSGGGGSGGGGSDIVLTQSPATLSVTPGDSVSLSCRASQIISNNLHWYQQKSHESPRLLIKYASQSISGIPSRFSGSGSGTDFTLSINSVETEDFGMYFCQQSNSWPLTFGSGTKLEIKRTTTPAPRPPTPAPTIASQPLSLRPEACRPAAGGAVHTRGLDFACDIYIWAPLAGTCGVLLLSLVITLYCKRGRKKLLYIFKQPFMRPVQTTQEEDGCSCRFPEEEEGGCELRVKFSRSADAPAYQQGQNQLYNELNLGRREEYDVLDKRRGRDPEMGGKPRRKNPQEGLYNELQKDKMAEAYSEIGMKGERRRGKGHDGLYQGLSTATKDTYDALHMQALPPR

SEQ ID NO: 7885 - protein, 674 aa, Artificial Sequence
  source: /note="Description of Artificial Sequence: Synthetic Chimeric Antigen Receptor"
MALPVTALLLPLALLLHAARPEVVVVESGGGFVKPGGSLKLSCAAAGFTFSRYAMSWVRQTPEKRLEWVATISSGGSHTYYPDSVKGRFTISRDNAKNTLYLQMSSLRSEDTAIYYCARPGYDRGAWFFDVWGAGTTVTVSSGGGGSGGGGSGGGGSDIVLTQSPATLSVTPGDSVSLSCRASQIISNNLHWYQQKSHESPRLLIKYASQSISGIPSRFSGSGSGTDFTLSINSVETEDFGMYFCQQSNSWPLTFGSGTKLEIKREPKSPDKTHTCPPCPAPPVAGPSVFLFPPKPKDTLMIARTPEVTCVVVDVSHEDPEVKFNWYVDGVEVHNAKTKPREEQYNSTYRVVSVLTVLHQDWLNGKEYKCKVSNKALPAPIEKTISKAKGQPREPQVYTLPPSRDELTKNQVSLTCLVKGFYPSDIAVEWESNGQPENNYKTTPPVLDSDGSFFLYSKLTVDKSRWQQGNVFSCSVMHEALHNHYTQKSLSLSPGKIYIWAPLAGTCGVLLLSLVITLYCKRGRKKLLYIFKQPFMRPVQTTQEEDGCSCRFPEEEEGGCELRVKFSRSADAPAYQQGQNQLYNELNLGRREEYDVLDKRRGRDPEMGGKPRRKNPQEGLYNELQKDKMAEAYSEIGMKGERRRGKGHDGLYQGLSTATKDTYDALHMQALPPR

SEQ ID NO: 7886 - protein, 456 aa, Artificial Sequence
  source: /note="Description of Artificial Sequence: Synthetic Chimeric Antigen Receptor"
MALPVTALLLPLALLLHAARPEVTLVESGGDFVKPGGSLKVSCAASGFAFSHYAMSWVRQTPAKRLEWVAYISSGGSGTYYSDSVKGRFTISRDNAKNTLYLQMRSLRSEDSAMYFCTRVKLGTYYFDSWGQGTTLTVSSGGGGSGGGGSGGGGSDIQMTQTASSLPASLGDRVTISCSASQDISNYLNWYQQKPDGTVKLLIFYSSNLHSGVPSRFSGGGSGTDYSLTISNLEPEDIATYFCHQYSKLPWTFGGGTKLEIKGLAVSTISSFFPPGYQIYIWAPLAGTCGVLLLSLVITLYCKRGRKKLLYIFKQPFMRPVQTTQEEDGCSCRFPEEEEGGCELRVKFSRSADAPAYQQGQNQLYNELNLGRREEYDVLDKRRGRDPEMGGKPRRKNPQEGLYNELQKDKMAEAYSEIGMKGERRRGKGHDGLYQGLSTATKDTYDALHMQALPPR

SEQ ID NO: 7887 - protein, 485 aa, Artificial Sequence
  source: /note="Description of Artificial Sequence: Synthetic Chimeric Antigen Receptor"
MALPVTALLLPLALLLHAARPEVTLVESGGDFVKPGGSLKVSCAASGFAFSHYAMSWVRQTPAKRLEWVAYISSGGSGTYYSDSVKGRFTISRDNAKNTLYLQMRSLRSEDSAMYFCTRVKLGTYYFDSWGQGTTLTVSSGGGGSGGGGSGGGGSDIQMTQTASSLPASLGDRVTISCSASQDISNYLNWYQQKPDGTVKLLIFYSSNLHSGVPSRFSGGGSGTDYSLTISNLEPEDIATYFCHQYSKLPWTFGGGTKLEIKTTTPAPRPPTPAPTIASQPLSLRPEACRPAAGGAVHTRGLDFACDIYIWAPLAGTCGVLLLSLVITLYCKRGRKKLLYIFKQPFMRPVQTTQEEDGCSCRFPEEEEGGCELRVKFSRSADAPAYQQGQNQLYNELNLGRREEYDVLDKRRGRDPEMGGKPRRKNPQEGLYNELQKDKMAEAYSEIGMKGERRRGKGHDGLYQGLSTATKDTYDALHMQALPPR

SEQ ID NO: 7888 - protein, 671 aa, Artificial Sequence
  source: /note="Description of Artificial Sequence: Synthetic Chimeric Antigen Receptor"
MALPVTALLLPLALLLHAARPEVTLVESGGDFVKPGGSLKVSCAASGFAFSHYAMSWVRQTPAKRLEWVAYISSGGSGTYYSDSVKGRFTISRDNAKNTLYLQMRSLRSEDSAMYFCTRVKLGTYYFDSWGQGTTLTVSSGGGGSGGGGSGGGGSDIQMTQTASSLPASLGDRVTISCSASQDISNYLNWYQQKPDGTVKLLIFYSSNLHSGVPSRFSGGGSGTDYSLTISNLEPEDIATYFCHQYSKLPWTFGGGTKLEIKEPKSPDKTHTCPPCPAPPVAGPSVFLFPPKPKDTLMIARTPEVTCVVVDVSHEDPEVKFNWYVDGVEVHNAKTKPREEQYNSTYRVVSVLTVLHQDWLNGKEYKCKVSNKALPAPIEKTISKAKGQPREPQVYTLPPSRDELTKNQVSLTCLVKGFYPSDIAVEWESNGQPENNYKTTPPVLDSDGSFFLYSKLTVDKSRWQQGNVFSCSVMHEALHNHYTQKSLSLSPGKIYIWAPLAGTCGVLLLSLVITLYCKRGRKKLLYIFKQPFMRPVQTTQEEDGCSCRFPEEEEGGCELRVKFSRSADAPAYQQGQNQLYNELNLGRREEYDVLDKRRGRDPEMGGKPRRKNPQEGLYNELQKDKMAEAYSEIGMKGERRRGKGHDGLYQGLSTATKDTYDALHMQALPPR

SEQ ID NO: 7889 - protein, 454 aa, Artificial Sequence
  source: /note="Description of Artificial Sequence: Synthetic Chimeric Antigen Receptor"
MALPVTALLLPLALLLHAARPQVQLQQSGGGLVKPGGSLTLSCAASRFTFSTYAMSWVRQTPAKRLEWVAYISSGGASTYYRDSVKGRFTISRDNAKNTLYLQMSSLRSEDTAMYYCARGGSRYAMDYWGQGTTVTVSSGGGGSGGGGSGGGGSDIQLTQSPAILSVSPGERVSFSCWASQSIGTSIHWYQQRTNGSPRLLIKYSSESISGIPSRFSGSGSGTDFTLSINSLESEDIADYYCQQTYSWPFTFGSGTKLEIGLAVSTISSFFPPGYQIYIWAPLAGTCGVLLLSLVITLYCKRGRKKLLYIFKQPFMRPVQTTQEEDGCSCRFPEEEEGGCELRVKFSRSADAPAYQQGQNQLYNELNLGRREEYDVLDKRRGRDPEMGGKPRRKNPQEGLYNELQKDKMAEAYSEIGMKGERRRGKGHDGLYQGLSTATKDTYDALHMQALPPR

SEQ ID NO: 7890 - protein, 483 aa, Artificial Sequence
  source: /note="Description of Artificial Sequence: Synthetic Chimeric Antigen Receptor"
MALPVTALLLPLALLLHAARPQVQLQQSGGGLVKPGGSLTLSCAASRFTFSTYAMSWVRQTPAKRLEWVAYISSGGASTYYRDSVKGRFTISRDNAKNTLYLQMSSLRSEDTAMYYCARGGSRYAMDYWGQGTTVTVSSGGGGSGGGGSGGGGSDIQLTQSPAILSVSPGERVSFSCWASQSIGTSIHWYQQRTNGSPRLLIKYSSESISGIPSRFSGSGSGTDFTLSINSLESEDIADYYCQQTYSWPFTFGSGTKLEITTTPAPRPPTPAPTIASQPLSLRPEACRPAAGGAVHTRGLDFACDIYIWAPLAGTCGVLLLSLVITLYCKRGRKKLLYIFKQPFMRPVQTTQEEDGCSCRFPEEEEGGCELRVKFSRSADAPAYQQGQNQLYNELNLGRREEYDVLDKRRGRDPEMGGKPRRKNPQEGLYNELQKDKMAEAYSEIGMKGERRRGKGHDGLYQGLSTATKDTYDALHMQALPPR

SEQ ID NO: 7891 - protein, 669 aa, Artificial Sequence
  source: /note="Description of Artificial Sequence: Synthetic Chimeric Antigen Receptor"
MALPVTALLLPLALLLHAARPQVQLQQSGGGLVKPGGSLTLSCAASRFTFSTYAMSWVRQTPAKRLEWVAYISSGGASTYYRDSVKGRFTISRDNAKNTLYLQMSSLRSEDTAMYYCARGGSRYAMDYWGQGTTVTVSSGGGGSGGGGSGGGGSDIQLTQSPAILSVSPGERVSFSCWASQSIGTSIHWYQQRTNGSPRLLIKYSSESISGIPSRFSGSGSGTDFTLSINSLESEDIADYYCQQTYSWPFTFGSGTKLEIEPKSPDKTHTCPPCPAPPVAGPSVFLFPPKPKDTLMIARTPEVTCVVVDVSHEDPEVKFNWYVDGVEVHNAKTKPREEQYNSTYRVVSVLTVLHQDWLNGKEYKCKVSNKALPAPIEKTISKAKGQPREPQVYTLPPSRDELTKNQVSLTCLVKGFYPSDIAVEWESNGQPENNYKTTPPVLDSDGSFFLYSKLTVDKSRWQQGNVFSCSVMHEALHNHYTQKSLSLSPGKIYIWAPLAGTCGVLLLSLVITLYCKRGRKKLLYIFKQPFMRPVQTTQEEDGCSCRFPEEEEGGCELRVKFSRSADAPAYQQGQNQLYNELNLGRREEYDVLDKRRGRDPEMGGKPRRKNPQEGLYNELQKDKMAEAYSEIGMKGERRRGKGHDGLYQGLSTATKDTYDALHMQALPPR

SEQ ID NO: 7892 - protein, 415 aa, Artificial Sequence
  source: /note="Description of Artificial Sequence: Synthetic Chimeric Antigen Receptor"
MDWIWRILFLVGAATGAHSQVQLQQSGAELVRPGASVKLSCKASGYTFTDYEMHWVKQTPVHGLKWIGALDPKTGDTAYSQKFKGKATLTADKSSSTAYMELRSLTSEDSAVYYCTRFYSYTYWGQGTLVTVSAGGGGSGGGGSGGGGSDVVMTQTPLSLPVSLGDQASISCRSSQSLVHSNGNTYLHWYLQKPGQSPKLLIYKVSNRFSGVPDRFSGSGSGTDFTLKISRVEAEDLGVYFCSQNTHVPPTFGSGTKLEIKEPKSCDKTHTCPPCPDPKFWVLVVVGGVLACYSLLVTVAFIIRVKFSRSADAPAYQQGQNQLYNELNLGRREEYDVLDKRRGRDPEMGGKPRRKNPQEGLYNELQKDKMAEAYSEIGMKGERRRGKGHDGLYQGLSTATKDTYDALHMQALPPR

SEQ ID NO: 7893 - protein, 396 aa, Artificial Sequence
  source: /note="Description of Artificial Sequence: Synthetic Chimeric Antigen Receptor"
QVQLQQSGAELVRPGASVKLSCKASGYTFTDYEMHWVKQTPVHGLKWIGALDPKTGDTAYSQKFKGKATLTADKSSSTAYMELRSLTSEDSAVYYCTRFYSYTYWGQGTLVTVSAGGGGSGGGGSGGGGSDVVMTQTPLSLPVSLGDQASISCRSSQSLVHSNGNTYLHWYLQKPGQSPKLLIYKVSNRFSGVPDRFSGSGSGTDFTLKISRVEAEDLGVYFCSQNTHVPPTFGSGTKLEIKEPKSCDKTHTCPPCPDPKFWVLVVVGGVLACYSLLVTVAFIIRVKFSRSADAPAYQQGQNQLYNELNLGRREEYDVLDKRRGRDPEMGGKPRRKNPQEGLYNELQKDKMAEAYSEIGMKGERRRGKGHDGLYQGLSTATKDTYDALHMQALPPR

SEQ ID NO: 7894 - protein, 459 aa, Artificial Sequence
  source: /note="Description of Artificial Sequence: Synthetic Chimeric Antigen Receptor"
MDWIWRILFLVGAATGAHSQVQLQQSGAELVRPGASVKLSCKASGYTFTDYEMHWVKQTPVHGLKWIGALDPKTGDTAYSQKFKGKATLTADKSSSTAYMELRSLTSEDSAVYYCTRFYSYTYWGQGTLVTVSAGGGGSGGGGSGGGGSDVVMTQTPLSLPVSLGDQASISCRSSQSLVHSNGNTYLHWYLQKPGQSPKLLIYKVSNRFSGVPDRFSGSGSGTDFTLKISRVEAEDLGVYFCSQNTHVPPTFGSGTKLEIKEPKSCDKTHTCPPCPDPKFWVLVVVGGVLACYSLLVTVAFIIFWVRSKRSRLLHSDYMNMTPRRPGPTRKHYQPYAPPRDFAAYRSRVKFSRSADAPAYQQGQNQLYNELNLGRREEYDVLDKRRGRDPEMGGKPRRKNPQEGLYNELQKDKMAEAYSEIGMKGERRRGKGHDGLYQGLSTATKDTYDALHMQALPPR

SEQ ID NO: 7895 - protein, 440 aa, Artificial Sequence
  source: /note="Description of Artificial Sequence: Synthetic Chimeric Antigen Receptor"
QVQLQQSGAELVRPGASVKLSCKASGYTFTDYEMHWVKQTPVHGLKWIGALDPKTGDTAYSQKFKGKATLTADKSSSTAYMELRSLTSEDSAVYYCTRFYSYTYWGQGTLVTVSAGGGGSGGGGSGGGGSDVVMTQTPLSLPVSLGDQASISCRSSQSLVHSNGNTYLHWYLQKPGQSPKLLIYKVSNRFSGVPDRFSGSGSGTDFTLKISRVEAEDLGVYFCSQNTHVPPTFGSGTKLEIKEPKSCDKTHTCPPCPDPKFWVLVVVGGVLACYSLLVTVAFIIFWVRSKRSRLLHSDYMNMTPRRPGPTRKHYQPYAPPRDFAAYRSRVKFSRSADAPAYQQGQNQLYNELNLGRREEYDVLDKRRGRDPEMGGKPRRKNPQEGLYNELQKDKMAEAYSEIGMKGERRRGKGHDGLYQGLSTATKDTYDALHMQALPPR

SEQ ID NO: 7896 - protein, 457 aa, Artificial Sequence
  source: /note="Description of Artificial Sequence: Synthetic Chimeric Antigen Receptor"
MDWIWRILFLVGAATGAHSQVQLQQSGAELVRPGASVKLSCKASGYTFTDYEMHWVKQTPVHGLKWIGALDPKTGDTAYSQKFKGKATLTADKSSSTAYMELRSLTSEDSAVYYCTRFYSYTYWGQGTLVTVSAGGGGSGGGGSGGGGSDVVMTQTPLSLPVSLGDQASISCRSSQSLVHSNGNTYLHWYLQKPGQSPKLLIYKVSNRFSGVPDRFSGSGSGTDFTLKISRVEAEDLGVYFCSQNTHVPPTFGSGTKLEIKEPKSCDKTHTCPPCPDPKFWVLVVVGGVLACYSLLVTVAFIIKRGRKKLLYIFKQPFMRPVQTTQEEDGCSCRFPEEEEGGCELRVKFSRSADAPAYQQGQNQLYNELNLGRREEYDVLDKRRGRDPEMGGKPRRKNPQEGLYNELQKDKMAEAYSEIGMKGERRRGKGHDGLYQGLSTATKDTYDALHMQALPPR

SEQ ID NO: 7897 - protein, 457 aa, Artificial Sequence; identical to SEQ ID NO: 7896
  source: /note="Description of Artificial Sequence: Synthetic Chimeric Antigen Receptor"

SEQ ID NO: 7898 - DNA, 1380 bp, Artificial Sequence
  source: /note="Description of Artificial Sequence: Synthetic Chimeric Antigen Receptor"
atggattggatttggcgcattctgtttctggtgggagccgcaaccggagcacatagtcaggtccagctgcagcagtcaggagccgaactggtgcggcccggcgcaagtgtcaaactgtcatgcaaggccagcgggtataccttcacagactacgagatgcactgggtgaaacagacccctgtgcacggcctgaagtggatcggcgctctggacccaaaaaccggggatacagcatattcccagaagtttaaaggaaaggccactctgaccgctgacaagagctcctctactgcctacatggagctgaggagcctgacatccgaagatagcgccgtgtactattgcacccgcttctactcctatacatactggggccaggggactctggtgaccgtctctgcaggaggaggaggctctggaggaggagggagtggaggcgggggaagcgacgtggtcatgacacagactccactgtccctgcccgtgagcctgggcgatcaggctagcatttcctgtcgaagttcacagagtctggtgcactcaaacggaaatacctatctgcattggtacctgcagaagccaggccagtctcccaaactgctgatctataaggtgagcaaccggttctccggggtccctgacagattttctggaagtggctcagggacagatttcactctgaaaattagcagagtggaggccgaagatctgggcgtctacttttgtagccagaatacccacgtcccaccaacattcggaagcggcactaaactggaaatcaaggagcccaaatcttgtgacaaaactcacacatgcccaccgtgcccggatccgaaagatcccaaattttgggtgctggtggtggttggtggagtcctggcttgctatagcttgctagtaacagtggcctttattattaaacggggcagaaagaaactcctgtatatattcaaacaaccatttatgagaccagtacaaactactcaagaggaagatggctgtagctgccgatttccagaagaagaagaaggaggatgtgaactgagagtgaagttcagcaggagcgcagacgcccccgcgtaccagcagggccagaaccagctctataacgagctcaatctaggacgaagagaggagtacgatgttttggacaagagacgtggccgggaccctgagatggggggaaagccgagaaggaagaaccctcaggaaggcctgtacaatgaactgcagaaagataagatggcggaggcctacagtgagattgggatgaaaggcgagcgccggaggggcaaggggcacgatggcctttaccagggtctcagtacagccaccaaggacacctacgacgcccttcacatgcaggccctgccccctcgc

SEQ ID NO: 7899 - protein, 486 aa, Artificial Sequence
  source: /note="Description of Artificial Sequence: Synthetic Chimeric Antigen Receptor"
MDWIWRILFLVGAATGAHSVLSGAELVRPGASVKLSCKASGYTFTDYEMHWVKQTPVHGLKWIGALDPKTGDTAYSQKFKGKATLTADKSSSTAYMELRSLTSEDSAVYYCTRFYSYTYWGQGTLVTVSAGGGGSGGGGSGGGGSDVVMTQTPLSLPVSLGDQASISCRSSQSLVHSNGNTYLHWYLQKPGQSPKLLIYKVSNRFSGVPDRFSGSGSGTDFTLKISRVEAEDLGVYFCSQNTHVPPTFGSGTKLEIKEPKSCDKTHTCPPCPDPKFWVLVVVGGVLACYSLLVTVAFIIFWVRSKRSRLLHSDYMNMTPRRPGPTRKHYQPYAPPRDFAAYRSKRGRKKLLYIFKPFMRPVTTEEDGCSCRFPEEEEGGCELRVKFSRSADAPAYGNLYNELNLGRREEYDVLDKRRGRDPEMGGKPRRKNPEGLYNELKDKMAEAYSEIGMKGERRRGKGHDGLYGLSTATKDTYDALHMALPPR

SEQ ID NO: 7900 - protein, 501 aa, Artificial Sequence
  source: /note="Description of Artificial Sequence: Synthetic Chimeric Antigen Receptor"
MDWIWRILFLVGAATGAHSQVQLQQSGAELVRPGASVKLSCKASGYTFTDYEMHWVKQTPVHGLKWIGALDPKTGDTAYSQKFKGKATLTADKSSSTAYMELRSLTSEDSAVYYCTRFYSYTYWGQGTLVTVSAGGGGSGGGGSGGGGSDVVMTQTPLSLPVSLGDQASISCRSSQSLVHSNGNTYLHWYLQKPGQSPKLLIYKVSNRFSGVPDRFSGSGSGTDFTLKISRVEAEDLGVYFCSQNTHVPPTFGSGTKLEIKEPKSCDKTHTCPPCPDPKFWVLVVVGGVLACYSLLVTVAFIIFWVRSKRSRLLHSDYMNMTPRRPGPTRKHYQPYAPPRDFAAYRSKRGRKKLLYIFKQPFMRPVQTTQEEDGCSCRFPEEEEGGCELRVKFSRSADAPAYQQGQNQLYNELNLGRREEYDVLDKRRGRDPEMGGKPRRKNPQEGLYNELQKDKMAEAYSEIGMKGERRRGKGHDGLYQGLSTATKDTYDALHMQALPPR

SEQ ID NO: 7901 - protein, 692 aa, Artificial Sequence; identical to SEQ ID NO: 7638
  source: /note="Description of Artificial Sequence: Synthetic Chimeric Antigen Receptor"

SEQ ID NO: 7902 - protein, 464 aa, Artificial Sequence
  source: /note="Description of Artificial Sequence: Synthetic Chimeric Antigen Receptor"
DVVMTQSPLSLPVTPGEPASISCRSSQSLVHSNANTYLHWYLQKPGQSPQLLIYKVSNRFSGVPDRFSGSGSGTDFTLKISRVEAEDVGVYYCSQNTHVPPTFGQGTKLEIKRGGGGSGGGGSGGGGSQVQLVQSGAEVKKPGASVKVSCKASGYTFTDYEMHWVRQAPGQGLEWMGALDPKTGDTAYSQKFKGRVTLTADESTSTAYMELSSLRSEDTAVYYCTRFYSYTYWGQGTLVTVSSTTTPAPRPPTPAPTIASQPLSLRPEACRPAAGGAVHTRGLDFACDIYIWAPLAGTCGVLLLSLVITKRGRKKLLYIFKQPFMRPVQTTQEEDGCSCRFPEEEEGGCELRVKFSRSADAPAYQQGQNQLYNELNLGRREEYDVLDKRRGRDPEMGGKPQRRKNPQEGLYNELQKDKMAEAYSEIGMKGERRRGKGHDGLYQGLSTATKDTYDALHMQALPPR

SEQ ID NO: 7903 - protein, 469 aa, Artificial Sequence
  source: /note="Description of Artificial Sequence: Synthetic Chimeric Antigen Receptor"
DVVMTQSPLSLPVTPGEPASISCRSSQSLVHSNANTYLHWYLQKPGQSPQLLIYKVSNRFSGVPDRFSGSGSGTDFTLKISRVEAEDVGVYYCSQNTHVPPTFGQGTKLEIKRGGGGSGGGGSGGGGSQVQLVQSGAEVKKPGASVKVSCKASGYTFTDYEMHWVRQAPGQGLEWMGALDPKTGDTAYSQKFKGRVTLTADESTSTAYMELSSLRSEDTAVYYCTRFYSYTYWGQGTLVTVSSTTTPAPRPPTPAPTIASQPLSLRPEACRPAAGGAVHTRGLDFACDFWVLVVVGGVLACYSLLVTVAFIIFWVRSKRSRLLHSDYMNMTPRRPGPTRKHYQPYAPPRDFAAYRSRVKFSRSADAPAYQQGQNQLYNELNLGRREEYDVLDKRRGRDPEMGGKPQRRKNPQEGLYNELQKDKMAEAYSEIGMKGERRRGKGHDGLYQGLSTATKDTYDALHMQALPPR

SEQ ID NO: 7904 - protein, 511 aa, Artificial Sequence
  source: /note="Description of Artificial Sequence: Synthetic Chimeric Antigen Receptor"
DVVMTQSPLSLPVTPGEPASISCRSSQSLVHSNANTYLHWYLQKPGQSPQLLIYKVSNRFSGVPDRFSGSGSGTDFTLKISRVEAEDVGVYYCSQNTHVPPTFGQGTKLEIKRGGGGSGGGGSGGGGSQVQLVQSGAEVKKPGASVKVSCKASGYTFTDYEMHWVRQAPGQGLEWMGALDPKTGDTAYSQKFKGRVTLTADESTSTAYMELSSLRSEDTAVYYCTRFYSYTYWGQGTLVTVSSTTTPAPRPPTPAPTIASQPLSLRPEACRPAAGGAVHTRGLDFACDFWVLVVVGGVLACYSLLVTVAFIIFWVRSKRSRLLHSDYMNMTPRRPGPTRKHYQPYAPPRDFAAYRSKRGRKKLLYIFKQPFMRPVQTTQEEDGCSCRFPEEEEGGCELRVKFSRSADAPAYQQGQNQLYNELNLGRREEYDVLDKRRGRDPEMGGKPQRRKNPQEGLYNELQKDKMAEAYSEIGMKGERRRGKGHDGLYQGLSTATKDTYDALHMQALPPR

SEQ ID NO: 7905 - protein, 500 aa, Artificial Sequence
  source: /note="Description of Artificial Sequence: Synthetic Chimeric Antigen Receptor"
DIQMTQSPSSLSASVGDRVTITCRASQNIATDVSTAVAWIQQKPGKAPKLLIYSASFLYSGVPSRFSGSGSGTDFTLTISSLQPEDFATYYCQQSEPEPYTFGQGTKVEIKRGSTSGSGKPGSGEGSTKGEVQLVESGGGLVQPGGSLRLSCAASGFTLSGDWVIHWVRQAPGKGLEWVGEISAAGGYTDYADSVKGRFTISADTSKNTAYLQMNSLRAEDTAVYYCARESRVSFEAAMDYWGQGTLVPSDIAVEWESNGQPENNYKTTPPVLDSDGSFFLYSRLTVDKSRWQEGNVFSCSVMHEALHNHYTQKSLSLSLGKWVLVVVGGVLACYSLLVTVAFIIKRGRKKLLYIFKQPFMRPVQTTQEEDGCSCRFPEEEEGGCELRVKFSRSADAPAYQQGQNQLYNELNLGRREEYDVLDKRRGRDPEMGGKPQRRKNPQEGLYNELQKDKMAEAYSEIGMKGERRRGKGHDGLYQGLSTATKDTYDALHMQALPPR

SEQ ID NO: 7906 - protein, 503 aa, Artificial Sequence
  source: /note="Description of Artificial Sequence: Synthetic Chimeric Antigen Receptor"
DIQMTQSPSSLSASVGDRVTITCRASQNIATDVSTAVAWIQQKPGKAPKLLIYSASFLYSGVPSRFSGSGSGTDFTLTISSLQPEDFATYYCQQSEPEPYTFGQGTKVEIKRGSTSGSGKPGSGEGSTKGEVQLVESGGGLVQPGGSLRLSCAASGFTLSGDWVIHWVRQAPGKGLEWVGEISAAGGYTDYADSVKGRFTISADTSKNTAYLQMNSLRAEDTAVYYCARESRVSFEAAMDYWGQGTLVPSDIAVEWESNGQPENNYKTTPPVLDSDGSFFLYSRLTVDKSRWQEGNVFSCSVMHEALHNHYTQKSLSLSLGKFWVLVVVGGVLACYSLLVTVAFIIFWVRSKRSRLLHSDYMNMTPRRPGPTRKHYQPYAPPRDFAAYRSRVKFSRSADAPAYQQGQNQLYNELNLGRREEYDVLDKRRGRDPEMGGKPQRRKNPQEGLYNELQKDKMAEAYSEIGMKGERRRGKGHDGLYQGLSTATKDTYDALHMQALPPR

SEQ ID NO: 7907 - protein, 818 aa, Artificial Sequence
  source: /note="Description of Artificial Sequence: Synthetic Chimeric Antigen Receptor"
MLLLVTSLLLCELPHPAFLLIPEVQLVESGGGLVQPGGSLRLSCAASGFNIKDTYIHWVRQSPGKGLEWVARIYPTNGYTRYADSVKGRFTISADTSKNTAYLQMNSLRAEDTAIYYCSRWGGDGFYAMDYWGQGTLVTVSSASTKGPSVFPLAPSSKSTSGGTAALGCLVKDYFPEPVTVSWNSGALTSGVHTFPAVLQSSGLYSLSSVVTVPSSSLGTQTYICNVNHKPSNTKVDKKVEPKSCESKYGPPCPPCPGGGSSGGGSGGQPREPQVYTLPPSQEEMTKNQVSLTCLVKGFYPSDIAVEWESNGQPENNYKTTPPVLDSDGSFFLYSRLTVDKSRWQEGNVFSCSVMHEALHNHYTQKSLSLSLGKMFWVLVVVGGVLACYSLLVTVAFIIFWVRSKRSRGGHSDYMNMTPRRPGPTRKHYQPYAPPRDFAAYRSGGGRVKFSRSADAPAYQQGQNQLYNELNLGRREEYDVLDKRRGRDPEMGGKPRRKNPQEGLYNELQKDKMAEAYSEIGMKGERRRGKGHDGLYQGLSTATKDTYDALHMQALPPRLEGGGEGRGSLLTCGDVEENPGPRMLLLVTSLLLCELPHPAFLLIPDIQMTQSPILLSASVGDRVTITCRASQDVNTAVAWYQQRTNGSPRLLIYSASFLYSGVPSRFSGSRSGTDFTLTISSLQPEDEADYYCQQHYTTPPTFGAGTKVEIKRTVAAPSVFIFPPSDEQLKSGTASVVCLLNNFYPREAKVQWKVDNALQSGNSQESVTEQDSKDSTYSLSSTLTLSKADYEKHKVYACEVTHQGLSSPVTKSFNRGEC

SEQ ID NO: 7908 - protein, 1162 aa, Artificial Sequence
  source: /note="Description of Artificial Sequence: Synthetic Chimeric Antigen Receptor"
MLLLVTSLLLCELPHPAFLLIPEVQLVESGGGLVQPGGSLRLSCAASGFNIKDTYIHWVRQSPGKGLEWVARIYPTNGYTRYADSVKGRFTISADTSKNTAYLQMNSLRAEDTAIYYCSRWGGDGFYAMDYWGQGTLVTVSSASTKGPSVFPLAPSSKSTSGGTAALGCLVKDYFPEPVTVSWNSGALTSGVHTFPAVLQSSGLYSLSSVVTVPSSSLGTQTYICNVNHKPSNTKVDKKVEPKSCESKYGPPCPPCPGGGSSGGGSGGQPREPQVYTLPPSQEEMTKNQVSLTCLVKGFYPSDIAVEWESNGQPENNYKTTPPVLDSDGSFFLYSRLTVDKSRWQEGNVFSCSVMHEALHNHYTQKSLSLSLGKMFWVLVVVGGVLACYSLLVTVAFIIFWVRSKRSRGGHSDYMNMTPRRPGPTRKHYQPYAPPRDFAAYRSGGGRVKFSRSADAPAYQQGQNQLYNELNLGRREEYDVLDKRRGRDPEMGGKPRRKNPQEGLYNELQKDKMAEAYSEIGMKGERRRGKGHDGLYQGLSTATKDTYDALHMQALPPRLEGGGEGRGSLLTCGDVEENPGPRMPPPRLLFFLLFLTPMEVRPEEPLVVKVEEGDNAVLQCLKGTSDGPTQQLTWSRESPLKPFLKLSLGLPGLGIHMRPLAIWLFIFNVSQQMGGFYLCQPGPPSEKAWQPGWTVNVEGSGELFRWNVSDLGGLGCGLKNRSSEGPSSPSGKLMSPKLYVWAKDRPEIWEGEPPCVPPRDSLNQSLSQDLTMAPGSTLWLSCGVPPDSVSRGPLSWTHVHPKGPKSLLSLELKDDRPARDMWVMETGLLLPRATAQDAGKYYCHRGNLTMSFHLEITARPVLWHWLLRTGGWKVSAVTLAYLIFCLCSLVGILHLQRALVLRRKRGGSTSEGRGSLLTCGDVEENPGPMETDTLLLWVLLLWVPGSTGDIQMTQSPILLSASVGDRVTITCRASQDVNTAVAWYQQRTNGSPRLLIYSASFLYSGVPSRFSGSRSGTDFTLTISSLQPEDEADYYCQQHYTTPPTFGAGTKVEIKRTVAAPSVFIFPPSDEQLKSGTASVVCLLNNFYPREAKVQWKVDNALQSGNSQESVTEQDSKDSTYSLSSTLTLSKADYEKHKVYACEVTHQGLSSPVTKSFNRGEC

SEQ ID NO: 7909 - protein, 816 aa, Artificial Sequence
  source: /note="Description of Artificial Sequence: Synthetic Chimeric Antigen Receptor"
MLLLVTSLLLCELPHPAFLLIPDIQMTQSPILLSASVGDRVTITCRASQDVNTAVAWYQQRTNGSPRLLIYSASFLYSGVPSRFSGSRSGTDFTLTISSLQPEDEADYYCQQHYTTPPTFGAGTKVEIKRTVAAPSVFIFPPSDEQLKSGTASVVCLLNNFYPREAKVQWKVDNALQSGNSQESVTEQDSKDSTYSLSSTLTLSKADYEKHKVYACEVTHQGLSSPVTKSFNRGECLEGGGEGRGSLLTCGDVEENPGMLLLVTSLLLCELPHPAFLLIPEVQLVESGGGLVQPGGSLRLSCAASGFNIKDTYIHWVRQSPGKGLEWVARIYPTNGYTRYADSVKGRFTISADTSKNTAYLQMNSLRAEDTAIYYCSRWGGDGFYAMDYWGQGTLVTVSSASTKGPSVFPLAPSSKSTSGGTAALGCLVKDYFPEPVTVSWNSGALTSGVHTFPAVLQSSGLYSLSSVVTVPSSSLGTQTYICNVNHKPSNTKVDKKVEPKSCESKYGPPCPPCPGGGSSGGGSGGQPREPQVYTLPPSQEEMTKNQVSLTCLVKGFYPSDIAVEWESNGQPENNYKTTPPVLDSDGSFFLYSRLTVDKSRWQEGNVFSCSVMHEALHNHYTQKSLSLSLGKMFWVLVVVGGVLACYSLLVTVAFIIFWVRSKRSRGGHSDYMNMTPRRPGPTRKHYQPYAPPRDFAAYRSGGGRVKFSRSADAPAYQQGQNQLYNELNLGRREEYDVLDKRRGRDPEMGGKPRRKNPQEGLYNELQKDKMAEAYSEIGMKGERRRGKGHDGLYQGLSTATKDTYDALHMQALPPR

SEQ ID NO: 7910 - protein, 818 aa, Artificial Sequence; identical to SEQ ID NO: 7907
  source: /note="Description of Artificial Sequence: Synthetic Chimeric Antigen Receptor"

SEQ ID NO: 7911 - protein, 470 aa, Artificial Sequence
  source: /note="Description of Artificial Sequence: Synthetic Chimeric Antigen Receptor"
DIQMTQSPSSLSASVGDRVTITCRASQDVNTAVAWYQQKPGKAPKLLIVSASFLVSGVPSRFSGSRSGTDFTLTISSLQPEDFATYVCQQHYTTPPTFGQGTKVEIKRTGGGGSGGGGSGGGGSEVQLVESGGGLVQPGGSLRLSCAASGFNIKDTYIHWVRQAPGKGLEWVARIYPTNGYTRYADSVKGRFTISADTSKNTAYLQMNSLRAEDTAVVYCSRWGGDGFYAMDYWGQGTLVTVSSAAATTTPAPRPPTPAPTIASQPLSLRPEACRPAAGGAVHTRGLDFACDIYIWAPLAGTCGVLLLSLVITLVCKRGRKKLLYIFKQPFMRPVQTIQEEDGCSCRFPEEEEGGCELRVKFSRSADAPAYKQGQNQLYNELNLGRREEYDVLDKRRGRDPEMGGKPRRKNPQEGLYNELQKDKMAEAVSEIGMKGERRRGKGHDGLYQGLSTATKDTYDALHMQALPPR

SEQ ID NO: 7912 - protein, 438 aa, Artificial Sequence
  source: /note="Description of Artificial Sequence: Synthetic Chimeric Antigen Receptor"
DIQMTQSPSSLSASVGDRVTITCRASQDVNTAVAWYQQKPGKAPKLLIVSASFLVSGVPSRFSGSRSGTDFTLTISSLQPEDFATYVCQQHYTTPPTFGQGTKVEIKRTGGGGSGGGGSGGGGSEVQLVESGGGLVQPGGSLRLSCAASGFNIKDTYIHWVRQAPGKGLEWVARIYPTNGYTRYADSVKGRFTISADTSKNTAYLQMNSLRAEDTAVVYCSRWGGDGFYAMDYWGQGTLVTVSSAAAESKVGPPCPPCPDIYIWAPLAGTCGVLLLSLVITLVCKRGRKKLLYIFKQPFMRPVQTTQEEDGCSCRFPEEEEGGCELRVKFSRSADAPAYKQGQNQLYNELNLGRREEYDVLDKRRGRDPEMGGKPRRKNPQEGLYNELQKDKMAEAVSEIGMKGERRRGKGHDGLYQGLSTATKDTYDALHMQALPPR

SEQ ID NO: 7913 - protein, 470 aa, Artificial Sequence
  source: /note="Description of Artificial Sequence: Synthetic Chimeric Antigen Receptor"
DIQMTQSPSSLSASVGDRVTITCRASQDVNTAVAWYQQKPGKAPKLLIYSASFLYSGVPSRFSGSRSGTDFTLTISSLQPEDFATYYCQQHYTTPPTFGQGTKVEIKRTGGGGSGGGGSGGGGSEVQLVESGGGLVQPGGSLRLSCAASGFNIKDTYIHWVRQAPGKGLEWVARIYPTNGYTRYADSVKGRFTISADTSKNTAYLQMNSLRAEDTAVYYCSRWGGDGFYAMDYWGQGTLVTVSSAAATTTPAPRPPTPAPTIASQPLSLRPEACRPAAGGAVHTRGLDFACDIYIWAPLAGTCGVLLLSLVITLYCKRGRKKLLYIFKQPFMRPVQTTQEEDGCSCRFPEEEEGGCELRVKFSRSADAPAYKQGQNQLYNELNLGRREEYDVLDKRRGRDPEMGGKPRRKNPQEGLYNELQKDKMAEAYSEIGMKGERRRGKGHDGLYQGLSTATKDTYDALHMQALPPR

SEQ ID NO: 7914 - protein, 438 aa, Artificial Sequence
  source: /note="Description of Artificial Sequence: Synthetic Chimeric Antigen Receptor"
DIQMTQSPSSLSASVGDRVTITCRASQDVNTAVAWYQQKPGKAPKLLIYSASFLYSGVPSRFSGSRSGTDFTLTISSLQPEDFATYYCQQHYTTPPTFGQGTKVEIKRTGGGGSGGGGSGGGGSEVQLVESGGGLVQPGGSLRLSCAASGFNIKDTYIHWVRQAPGKGLEWVARIYPTNGYTRYADSVKGRFTISADTSKNTAYLQMNSLRAEDTAVYYCSRWGGDGFYAMDYWGQGTLVTVSSAAAESKYGPPCPPCPDIYIWAPLAGTCGVLLLSLVITLYCKRGRKKLLYIFKQPFMRPVQTTQEEDGCSCRFPEEEEGGCELRVKFSRSADAPAYKQGQNQLYNELNLGRREEYDVLDKRRGRDPEMGGKPRRKNPQEGLYNELQKDKMAEAYSEIGMKGERRRGKGHDGLYQGLSTATKDTYDALHMQALPPR

SEQ ID NO: 7915 - protein, 470 aa, Artificial Sequence; identical to SEQ ID NO: 7913
  source: /note="Description of Artificial Sequence: Synthetic Chimeric Antigen Receptor"

SEQ ID NO: 7916 - protein, 438 aa, Artificial Sequence; identical to SEQ ID NO: 7914
  source: /note="Description of Artificial Sequence: Synthetic Chimeric Antigen Receptor"

SEQ ID NO: 7917 - protein, 680 aa, Artificial Sequence
  source: /note="Description of Artificial Sequence: Synthetic Chimeric Antigen Receptor"
MLLLVTSLLLCELPHPAFLLIPMAQVKLQQSGPDLVKPGASVKISCKASGYSFTGYYMHWVKQSHGKSLEWIGRVNPNSGGTSYNQKFKDKAILTVDKSSSTAYMELRSLTSEDSAVYYCARSKGNYFYAMDYWGQGTTVTVSSSGGGSGGGGSGGGGSDIELTQSPSSLAVSLGQRATISCRASESVDSHGTSLMHWYQQKPGQPPKFLIYRASNLESGIPARFSGSGSRTDFTLTINPVETDDVAIYYCQQSNEDPPTFGGGTKLELKESKYGPPCPPCPAPEFLGGPSVFLFPPKPKDTLMISRTPEVTCVVVDVSQEDPEVQFNWYVDGVEVHNAKTKPREEQFNSTYRVVSVLTVLHQDWLNGKEYKCKVSNKGLPSSIEKTISKAKGQPREPQVYTLPPSQEEMTKNQVSLTCLVKGFYPSDIAVEWESNGQPENNYKTTPPVLDSDGSFFLYSRLTVDKSRWQEGNVFSCSVMHEALHNHYTQKSLSLSLGKMFWVLVVVGGVLACYSLLVTVAFIIFWVRSKRSRGGHSDYMNMTPRRPGPTRKHYQPYAPPRDFAAYRSRVKFSRSADAPAYQQGQNQLYNELNLGRREEYDVLDKRRGRDPEMGGKPRRKNPQEGLYNELQKDKMAEAYSEIGMKGERRRGKGHDGLYQGLSTATKDTYDALHMQALPPR

SEQ ID NO: 7918 - protein, 606 aa, Artificial Sequence
  source: /note="Description of Artificial Sequence: Synthetic Chimeric Antigen Receptor"
MHPLLNPLLLALGLMALLLTTVIALTCLGGFASPGPVPPSTALRELIEELVNITQNQKAPLCNGSMVWSINLTAGMYCAALESLINVSGCSAIEKTQRMLSGFCPHKVSAGQFSSLHVRDTKIEVAQFVKDLLLHLKKLFREGQFNPRKPTTTPAPRPPTPAPTIASQPLSLRPEACRPAAGGAVHTRGLDFAQLLCYLLDGILFIYGVILTALFLRVVTFWVRSKRSRLLHSDYMNMTPRRPGPTRKHYQPYAPPRDFAAYRSTRKFSRSADAPAYQQGQNQLYNELNLGRREEYDVLDKRRGRDPEMGGKPRRKNPQEGLYNELQKDKMAEAYSEIGMKGERRRGKGHDGLYQGLSTATKDTYDALHMQALPPRQPAAAEGRGSLLTCGDVEENPGPMDKDCEMKRTTLDSPLGKLELSGCEQGLHEIKLLGKGTSAADAVEVPAPAAVLGGPEPLMQCTAWLNAYFHQPEAIEEFPVPALHHPVFQQESFTRQVLWKLLKVVKFGEVISYQQLAALAGNPKAARAVGGAMRGNPVKILIPCHRVVCSSGAVGNYSGGLAVKEWLLAHEGHRLGKPGLGGSSGLAGAWLKGAGATSGSPPAGRN

SEQ ID NO: 7919 - protein, 692 aa, Artificial Sequence; identical to SEQ ID NO: 7638
  source: /note="Description of Artificial Sequence: Synthetic Chimeric Antigen Receptor"

SEQ ID NO: 7920 - protein, 380 aa, Artificial Sequence [sequence omitted]

SEQ ID NO: 7921 - protein, 362 aa, Artificial Sequence
  source: /note="Description of Artificial Sequence: Synthetic Chimeric Antigen Receptor"
MVRGVPFRHLLLVLQLALLPAATQGKKVVLGKKGDTVELTCTASQKKSIQFHWKNSNQIKILGNQGSFLTKGPSKLNDRADSRRSLWDQGNFPLIIKNLKIEDSDTYICEVEDQKEEVQLLVFGLTANSDTHLLQGQSLTLTLESPPGSSPSVQCRSPRGKNIQGGKTLSVSQLELQDSGTWTCTVLQNQKKVEFKIDIVVLAFQKASGGGGSIYQELTDLKTAFERLCRHCPKDWTFFQGNCYFMSNSQRNWHDSVTACQEVRAQLVVIKTAEEQNFLQLQTSRSNRFSWMGLSDLNQEGTWQWVDGSPLSPSFQRYWNSGEPNNSGNEDCAEFSGSGWNDNRCDVDNYWICKKPAACFRD

SEQ ID NO: 7922 - protein, 354 aa, Artificial Sequence
  source: /note="Description of Artificial Sequence: Synthetic Chimeric Antigen Receptor"
MVRGVPFRHLLLVLQLALLPAATQGKKVVLGKKGDTVELTCTASQKKSIQFHWKNSNQIKILGNQGSFLTKGPSKLNDRADSRRSLWDQGNFPLIIKNLKIEDSDTYICEVEDQKEEVQLLVFGLTANSDTHLLQGQSLTLTLESPPGSSPSVQCRSPRGKNIQGGKTLSVSQLELQDSGTWTCTVLQNQKKVEFKIDIVVLAFQKASGGGGSQNDILQVVSQGWKYFKGNFYYFSLIPKTWYSAEQFCVSRNSHLTSVTSESEQEFLYKTAGGLIYWIGLTKAGMEGDWSWVDDTPFNKVQSVRFWIPGEPNNAGNNEHCGNIKAPSLQAWNDAPCDKTFLFICKRPYVPSEP

SEQ ID NO: 7923 - protein, 330 aa, Artificial Sequence
  source: /note="Description of Artificial Sequence: Synthetic Chimeric Antigen Receptor"
MVRGVPFRHLLLVLQLALLPAATQGKKVVLGKKGDTVELTCTASQKKSIQFHWKNSNQIKILGNQGSFLTKGPSKLNDRADSRRSLWDQGNFPLIIKNLKIEDSDTYICEVEDQKEEVQLLVFGLTANSDTHLLQGQSLTLTLESPPGSSPSVQCRSPRGKNIQGGKTLSVSQLELQDSGTWTCTVLQNQKKVEFKIDIVVLAFQKASGGGGSKQVGNKFFLTNGEIMTFEKVKALCVKFQASVATPRNAAENGAIQNLIKEEAFLGITDEKTEGQFVDLTGNRLTYTNWNEGEPNNAGSDEDCVLLLKNGQWNDVPCSTSHLAVCEFPI

SEQ ID NO: 7924 - protein, 717 aa, Artificial Sequence [sequence omitted]

SEQ ID NO: 7925 - protein, 457 aa, Artificial Sequence
  source: /note="Description of Artificial Sequence: Synthetic Chimeric Antigen Receptor"
MALPVTALLLPLALLLHAARPEVKLQESGPGLVAPSQSLSFTCTVSGFSLSRNSVHWVRQPPGKGLEWLGMIWGGGSTDYNSALKSRLNISKDSSKSQVFLKMNSLQTDDTAMYFCARNGGYDVFHYWGQGTTVTVSSGGGGSGGGGSGGGGSQAVVTQESALTTSPGETVTLTCRSSTGAVTTSNYANWVQEKPDHLFTGLIGGTNNRAPGVPARFSGSLIGDKAALTITGAQTEDEAIYFCALWYSNHLVFGGGTKLTVLGGLAVSTISSFFPPGYQIYIWAPLAGTCGVLLLSLVITLYCKRGRKKLLYIFKQPFMRPVQTTQEEDGCSCRFPEEEEGGCELRVKFSRSADAPAYQQGQNQLYNELNLGRREEYDVLDKRRGRDPEMGGKPRRKNPQEGLYNELQKDKMAEAYSEIGMKGERRRGKGHDGLYQGLSTATKDTYDALHMQALPPR

SEQ ID NO: 7926 - protein, 460 aa, Artificial Sequence
  source: /note="Description of Artificial Sequence: Synthetic Chimeric Antigen Receptor"
MALPVTALLLPLALLLHAARPEVKLQESGPGLVAPSQSLSFTCTVSGFSLSRNSVHWVRQPPGKGLEWLGMIWGGGSTDYNSALKSRLNISKDSSKSQVFLKMNSLQTDDTAMYFCARNGGYDVFHYWGQGTTVTVSSGGGGSGGGGSGGGGSQAVVTQESALTTSPGETVTLTCRSSTGAVTTSNYANWVQEKPDHLFTGLIGGTNNRAPGVPARFSGSLIGDKAALTITGAQTEDEAIYFCALWYSNHLVFGGGTKLTVLGGLAVSTISSFFPPGYQIISFFLALTSTALLFLLFFLTLRFSVVKRGRKKLLYIFKQPFMRPVQTTQEEDGCSCRFPEEEEGGCELRVKFSRSADAPAYQQGQNQLYNELNLGRREEYDVLDKRRGRDPEMGGKPRRKNPQEGLYNELQKDKMAEAYSEIGMKGERRRGKGHDGLYQGLSTATKDTYDALHMQALPPR

SEQ ID NO: 7927 - protein, 486 aa, Artificial Sequence
  source: /note="Description of Artificial Sequence: Synthetic Chimeric Antigen Receptor"
MALPVTALLLPLALLLHAARPEVKLQESGPGLVAPSQSLSFTCTVSGFSLSRNSVHWVRQPPGKGLEWLGMIWGGGSTDYNSALKSRLNISKDSSKSQVFLKMNSLQTDDTAMYFCARNGGYDVFHYWGQGTTVTVSSGGGGSGGGGSGGGGSQAVVTQESALTTSPGETVTLTCRSSTGAVTTSNYANWVQEKPDHLFTGLIGGTNNRAPGVPARFSGSLIGDKAALTITGAQTEDEAIYFCALWYSNHLVFGGGTKLTVLGTTTPAPRPPTPAPTIASQPLSLRPEACRPAAGGAVHTRGLDFACDIYIWAPLAGTCGVLLLSLVITLYCKRGRKKLLYIFKQPFMRPVQTTQEEDGCSCRFPEEEEGGCELRVKFSRSADAPAYQQGQNQLYNELNLGRREEYDVLDKRRGRDPEMGGKPRRKNPQEGLYNELQKDKMAEAYSEIGMKGERRRGKGHDGLYQGLSTATKDTYDALHMQALPPR

SEQ ID NO: 7928 - protein, 489 aa, Artificial Sequence
  source: /note="Description of Artificial Sequence: Synthetic Chimeric Antigen Receptor"
MALPVTALLLPLALLLHAARPEVKLQESGPGLVAPSQSLSFTCTVSGFSLSRNSVHWVRQPPGKGLEWLGMIWGGGSTDYNSALKSRLNISKDSSKSQVFLKMNSLQTDDTAMYFCARNGGYDVFHYWGQGTTVTVSSGGGGSGGGGSGGGGSQAVVTQESALTTSPGETVTLTCRSSTGAVTTSNYANWVQEKPDHLFTGLIGGTNNRAPGVPARFSGSLIGDKAALTITGAQTEDEAIYFCALWYSNHLVFGGGTKLTVLGTTTPAPRPPTPAPTIASQPLSLRPEACRPAAGGAVHTRGLDFACDIISFFLALTSTALLFLLFFLTLRFSVVKRGRKKLLYIFKQPFMRPVQTTQEEDGCSCRFPEEEEGGCELRVKFSRSADAPAYQQGQNQLYNELNLGRREEYDVLDKRRGRDPEMGGKPRRKNPQEGLYNELQKDKMAEAYSEIGMKGERRRGKGHDGLYQGLSTATKDTYDALHMQALPPR

SEQ ID NO: 7929 - protein, 672 aa, Artificial Sequence
  source: /note="Description of Artificial Sequence: Synthetic Chimeric Antigen Receptor"
MALPVTALLLPLALLLHAARPEVKLQESGPGLVAPSQSLSFTCTVSGFSLSRNSVHWVRQPPGKGLEWLGMIWGGGSTDYNSALKSRLNISKDSSKSQVFLKMNSLQTDDTAMYFCARNGGYDVFHYWGQGTTVTVSSGGGGSGGGGSGGGGSQAVVTQESALTTSPGETVTLTCRSSTGAVTTSNYANWVQEKPDHLFTGLIGGTNNRAPGVPARFSGSLIGDKAALTITGAQTEDEAIYFCALWYSNHLVFGGGTKLTVLGEPKSPDKTHTCPPCPAPPVAGPSVFLFPPKPKDTLMIARTPEVTCVVVDVSHEDPEVKFNWYVDGVEVHNAKTKPREEQYNSTYRVVSVLTVLHQDWLNGKEYKCKVSNKALPAPIEKTISKAKGQPREPQVYTLPPSRDELTKNQVSLTCLVKGFYPSDIAVEWESNGQPENNYKTTPPVLDSDGSFFLYSKLTVDKSRWQQGNVFSCSVMHEALHNHYTQKSLSLSPGKIYIWAPLAGTCGVLLLSLVITLYCKRGRKKLLYIFKQPFMRPVQTTQEEDGCSCRFPEEEEGGCELRVKFSRSADAPAYQQGQNQLYNELNLGRREEYDVLDKRRGRDPEMGGKPRRKNPQEGLYNELQKDKMAEAYSEIGMKGERRRGKGHDGLYQGLSTATKDTYDALHMQALPPR

SEQ ID NO: 7930 - protein, 675 aa, Artificial Sequence
  source: /note="Description of Artificial Sequence: Synthetic Chimeric Antigen Receptor"
MALPVTALLLPLALLLHAARPEVKLQESGPGLVAPSQSLSFTCTVSGFSLSRNSVHWVRQPPGKGLEWLGMIWGGGSTDYNSALKSRLNISKDSSKSQVFLKMNSLQTDDTAMYFCARNGGYDVFHYWGQGTTVTVSSGGGGSGGGGSGGGGSQAVVTQESALTTSPGETVTLTCRSSTGAVTTSNYANWVQEKPDHLFTGLIGGTNNRAPGVPARFSGSLIGDKAALTITGAQTEDEAIYFCALWYSNHLVFGGGTKLTVLGEPKSPDKTHTCPPCPAPPVAGPSVFLFPPKPKDTLMIARTPEVTCVVVDVSHEDPEVKFNWYVDGVEVHNAKTKPREEQYNSTYRVVSVLTVLHQDWLNGKEYKCKVSNKALPAPIEKTISKAKGQPREPQVYTLPPSRDELTKNQVSLTCLVKGFYPSDIAVEWESNGQPENNYKTTPPVLDSDGSFFLYSKLTVDKSRWQQGNVFSCSVMHEALHNHYTQKSLSLSPGKIISFFLALTSTALLFLLFFLTLRFSVVKRGRKKLLYIFKQPFMRPVQTTQEEDGCSCRFPEEEEGGCELRVKFSRSADAPAYQQGQNQLYNELNLGRREEYDVLDKRRGRDPEMGGKPRRKNPQEGLYNELQKDKMAEAYSEIGMKGERRRGKGHDGLYQGLSTATKDTYDALHMQALPPR

SEQ ID NO: 7931 - protein, 457 aa, Artificial Sequence
  source: /note="Description of Artificial Sequence: Synthetic Chimeric Antigen Receptor"
MALPVTALLLPLALLLHAARPEVQLVESGGGLVQPGGSLRLSCAASGFSLSRNSVHWVRQAPGKGLEWLGMIWGGGSTDYNSALKSRFTISRDNSKNTLYLQMNSLRAEDTAVYYCARNGGYDVFHYWGQGTTVTVSSGGGGSGGGGSGGGGSQAVVTQEPSLTVSPGGTVTLTCRSSTGAVTTSNYANWVQQKPGQAPRGLIGGTNNRAPWTPARFSGSLLGGKAALTLSGVQPEDEAEYYCALWYSNHLVFGGGTKLTVLGGLAVSTISSFFPPGYQIYIWAPLAGTCGVLLLSLVITLYCKRGRKKLLYIFKQPFMRPVQTTQEEDGCSCRFPEEEEGGCELRVKFSRSADAPAYQQGQNQLYNELNLGRREEYDVLDKRRGRDPEMGGKPRRKNPQEGLYNELQKDKMAEAYSEIGMKGERRRGKGHDGLYQGLSTATKDTYDALHMQALPPR

SEQ ID NO: 7932 - protein, 460 aa, Artificial Sequence
  source: /note="Description of Artificial Sequence: Synthetic Chimeric Antigen Receptor"
MALPVTALLLPLALLLHAARPEVQLVESGGGLVQPGGSLRLSCAASGFSLSRNSVHWVRQAPGKGLEWLGMIWGGGSTDYNSALKSRFTISRDNSKNTLYLQMNSLRAEDTAVYYCARNGGYDVFHYWGQGTTVTVSSGGGGSGGGGSGGGGSQAVVTQEPSLTVSPGGTVTLTCRSSTGAVTTSNYANWVQQKPGQAPRGLIGGTNNRAPWTPARFSGSLLGGKAALTLSGVQPEDEAEYYCALWYSNHLVFGGGTKLTVLGGLAVSTISSFFPPGYQIISFFLALTSTALLFLLFFLTLRFSVVKRGRKKLLYIFKQPFMRPVQTTQEEDGCSCRFPEEEEGGCELRVKFSRSADAPAYQQGQNQLYNELNLGRREEYDVLDKRRGRDPEMGGKPRRKNPQEGLYNELQKDKMAEAYSEIGMKGERRRGKGHDGLYQGLSTATKDTYDALHMQALPPR

SEQ ID NO: 7933 - protein, 486 aa, Artificial Sequence
  source: /note="Description of Artificial Sequence: Synthetic Chimeric Antigen Receptor"
MALPVTALLLPLALLLHAARPEVQLVESGGGLVQPGGSLRLSCAASGFSLSRNSVHWVRQAPGKGLEWLGMIWGGGSTDYNSALKSRFTISRDNSKNTLYLQMNSLRAEDTAVYYCARNGGYDVFHYWGQGTTVTVSSGGGGSGGGGSGGGGSQAVVTQEPSLTVSPGGTVTLTCRSSTGAVTTSNYANWVQQKPGQAPRGLIGGTNNRAPWTPARFSGSLLGGKAALTLSGVQPEDEAEYYCALWYSNHLVFGGGTKLTVLGTTTPAPRPPTPAPTIASQPLSLRPEACRPAAGGAVHTRGLDFACDIYIWAPLAGTCGVLLLSLVITLYCKRGRKKLLYIFKQPFMRPVQTTQEEDGCSCRFPEEEEGGCELRVKFSRSADAPAYQQGQNQLYNELNLGRREEYDVLDKRRGRDPEMGGKPRRKNPQEGLYNELQKDKMAEAYSEIGMKGERRRGKGHDGLYQGLSTATKDTYDALHMQALPPR

SEQ ID NO: 7934 - protein, 489 aa, Artificial Sequence
  source: /note="Description of Artificial Sequence: Synthetic Chimeric Antigen Receptor"
MALPVTALLLPLALLLHAARPEVQLVESGGGLVQPGGSLRLSCAASGFSLSRNSVHWVRQAPGKGLEWLGMIWGGGSTDYNSALKSRFTISRDNSKNTLYLQMNSLRAEDTAVYYCARNGGYDVFHYWGQGTTVTVSSGGGGSGGGGSGGGGSQAVVTQEPSLTVSPGGTVTLTCRSSTGAVTTSNYANWVQQKPGQAPRGLIGGTNNRAPWTPARFSGSLLGGKAALTLSGVQPEDEAEYYCALWYSNHLVFGGGTKLTVLGTTTPAPRPPTPAPTIASQPLSLRPEACRPAAGGAVHTRGLDFACDIISFFLALTSTALLFLLFFLTLRFSVVKRGRKKLLYIFKQPFMRPVQTTQEEDGCSCRFPEEEEGGCELRVKFSRSADAPAYQQGQNQLYNELNLGRREEYDVLDKRRGRDPEMGGKPRRKNPQEGLYNELQKDKMAEAYSEIGMKGERRRGKGHDGLYQGLSTATKDTYDALHMQALPPR

SEQ ID NO: 7935 - protein, 672 aa, Artificial Sequence
  source: /note="Description of Artificial Sequence: Synthetic Chimeric Antigen Receptor"
MALPVTALLLPLALLLHAARPEVQLVESGGGLVQPGGSLRLSCAASGFSLSRNSVHWVRQAPGKGLEWLGMIWGGGSTDYNSALKSRFTISRDNSKNTLYLQMNSLRAEDTAVYYCARNGGYDVFHYWGQGTTVTVSSGGGGSGGGGSGGGGSQAVVTQEPSLTVSPGGTVTLTCRSSTGAVTTSNYANWVQQKPGQAPRGLIGGTNNRAPWTPARFSGSLLGGKAALTLSGVQPEDEAEYYCALWYSNHLVFGGGTKLTVLGEPKSPDKTHTCPPCPAPPVAGPSVFLFPPKPKDTLMIARTPEVTCVVVDVSHEDPEVKFNWYVDGVEVHNAKTKPREEQYNSTYRVVSVLTVLHQDWLNGKEYKCKVSNKALPAPIEKTISKAKGQPREPQVYTLPPSRDELTKNQVSLTCLVKGFYPSDIAVEWESNGQPENNYKTTPPVLDSDGSFFLYSKLTVDKSRWQQGNVFSCSVMHEALHNHYTQKSLSLSPGKIYIWAPLAGTCGVLLLSLVITLYCKRGRKKLLYIFKQPFMRPVQTTQEEDGCSCRFPEEEEGGCELRVKFSRSADAPAYQQGQNQLYNELNLGRREEYDVLDKRRGRDPEMGGKPRRKNPQEGLYNELQKDKMAEAYSEIGMKGERRRGKGHDGLYQGLSTATKDTYDALHMQALPPR

SEQ ID NO: 7936 - protein, 675 aa, Artificial Sequence
  source: /note="Description of Artificial Sequence: Synthetic Chimeric Antigen Receptor"
MALPVTALLLPLALLLHAARPEVQLVESGGGLVQPGGSLRLSCAASGFSLSRNSVHWVRQAPGKGLEWLGMIWGGGSTDYNSALKSRFTISRDNSKNTLYLQMNSLRAEDTAVYYCARNGGYDVFHYWGQGTTVTVSSGGGGSGGGGSGGGGSQAVVTQEPSLTVSPGGTVTLTCRSSTGAVTTSNYANWVQQKPGQAPRGLIGGTNNRAPWTPARFSGSLLGGKAALTLSGVQPEDEAEYYCALWYSNHLVFGGGTKLTVLGEPKSPDKTHTCPPCPAPPVAGPSVFLFPPKPKDTLMIARTPEVTCVVVDVSHEDPEVKFNWYVDGVEVHNAKTKPREEQYNSTYRVVSVLTVLHQDWLNGKEYKCKVSNKALPAPIEKTISKAKGQPREPQVYTLPPSRDELTKNQVSLTCLVKGFYPSDIAVEWESNGQPENNYKTTPPVLDSDGSFFLYSKLTVDKSRWQQGNVFSCSVMHEALHNHYTQKSLSLSPGKIISFFLALTSTALLFLLFFLTLRFSVVKRGRKKLLYIFKQPFMRPVQTTQEEDGCSCRFPEEEEGGCELRVKFSRSADAPAYQQGQNQLYNELNLGRREEYDVLDKRRGRDPEMGGKPRRKNPQEGLYNELQKDKMAEAYSEIGMKGERRRGKGHDGLYQGLSTATKDTYDALHMQALPPR

SEQ ID NO: 7937 - protein, 180 aa, Artificial Sequence; identical to SEQ ID NO: 6696
  source: /note="Description of Artificial Sequence: Synthetic Chimeric Antigen Receptor"

SEQ ID NO: 7938 - protein, 606 aa, Artificial Sequence
  source: /note="Description of Artificial Sequence: Synthetic Chimeric Antigen Receptor"
MHPLLNPLLLALGLMALLLTTVIALTCLGGFASPGPVPPSTALRYLIEELVNITQNQKAPLCNGSMVWSINLTAGMYCAALESLINVSGCSAIEKTQRMLSGFCPHKVSAGQFSSLHVRDTKIEVAQFVKDLLLHLKKLFREGQFNPRKPTTTPAPRPPTPAPTIASQPLSLRPEACRPAAGGAVHTRGLDFAQLLCYLLDGILFIYGVILTALFLRVVTFWVRSKRSRLLHSDYMNMTPRRPGPTRKHYQPYAPPRDFAAYRSTRKFSRSADAPAYQQGQNQLYNELNLGRREEYDVLDKRRGRDPEMGGKPRRKNPQEGLYNELQKDKMAEAYSEIGMKGERRRGKGHDGLYQGLSTATKDTYDALHMQALPPRQPAAAEGRGSLLTCGDVEENPGPMDKDCEMKRTTLDSPLGKLELSGCEQGLHEIKLLGKGTSAADAVEVPAPAAVLGGPEPLMQCTAWLNAYFHQPEAIEEFPVPALHHPVFQQESFTRQVLWKLLKVVKFGEVISYQQLAALAGNPKAARAVGGAMRGNPVKILIPCHRVVCSSGAVGNYSGGLAVKEWLLAHEGHRLGKPGLGGSSGLAGAWLKGAGATSGSPPAGRN

SEQ ID NO: 7939 - protein, 606 aa, Artificial Sequence
  source: /note="Description of Artificial Sequence: Synthetic Chimeric Antigen Receptor"
MHPLLNPLLLALGLMALLLTTVIALTCLGGFASPGPVPPSTALRKLIEELVNITQNQKAPLCNGSMVWSINLTAGMYCAALESLINVSGCSAIEKTQRMLSGFCPHKVSAGQFSSLHVRDTKIEVAQFVKDLLLHLKKLFKEGQFNPRKPTTTPAPRPPTPAPTIASQPLSLRPEACRPAAGGAVHTRGLDFAQLLCYLLDGILFIYGVILTALFLRVVTFWVRSKRSRLLHSDYMNMTPRRPGPTRKHYQPYAPPRDFAAYRSTRKFSRSADAPAYQQGQNQLYNELNLGRREEYDVLDKRRGRDPEMGGKPRRKNPQEGLYNELQKDKMAEAYSEIGMKGERRRGKGHDGLYQGLSTATKDTYDALHMQALPPRQPAAAEGRGSLLTCGDVEENPGPMDKDCEMKRTTLDSPLGKLELSGCEQGLHEIKLLGKGTSAADAVEVPAPAAVLGGPEPLMQCTAWLNAYFHQPEAIEEFPVPALHHPVFQQESFTRQVLWKLLKVVKFGEVISYQQLAALAGNPKAARAVGGAMRGNPVKILIPCHRVVCSSGAVGNYSGGLAVKEWLLAHEGHRLGKPGLGGSSGLAGAWLKGAGATSGSPPAGRN

SEQ ID NO: 7940 - protein, 889 aa, Artificial Sequence
  source: /note="Description of Artificial Sequence: Synthetic Chimeric Antigen Receptor"
MLLLVTSLLLCELPHPAFLLIPGPVPPSTALRYLIEELVNITQNQKAPLCNGSMVWSINLTAGMYCAALESLINVSGCSAIEKTQRMLSGFCPHKVSAGQFSSLHVRDTKIEVAQFVKDLLLHLKKLFREGRFNESKYGPPCPPCPAPEFEGGPSVFLFPPKPKDTLMISRTPEVTCVVVDVSQEDPEVQFNWYVDGVEVHNAKTKPREEQFQSTYRVVSVLTVLHQDWLNGKEYKCKVSNKGLPSSIEKTISKAKGQPREPQVYTLPPSQEEMTKNQVSLTCLVKGFYPSDIAVEWESNGQPENNYKTTPPVLDSDGSFFLYSRLTVDKSRWQEGNVFSCSVMHEALHNHYTQKSLSLSLGKMALIVLGGVAGLLLFIGLGIFFKRGRKKLLYIFKQPFMRPVQTTQEEDGCSCRFPEEEEGGCELGGGRVKFSRSADAPAYQQGQNQLYNELNLGRREEYDVLDKRRGRDPEMGGKPRRKNPQEGLYNELQKDKMAEAYSEIGMKGERRRGKGHDGLYQGLSTATKDTYDALHMQALPPRLEGGGEGRGSLLTCGDVEENPGPRMPPPRLLFFLLFLTPMEVRPEEPLVVKVEEGDNAVLQCLKGTSDGPTQQLTWSRESPLKPFLKLSLGLPGLGIHMRPLAIWLFIFNVSQQMGGFYLCQPGPPSEKAWQPGWTVNVEGSGELFRWNVSDLGGLGCGLKNRSSEGPSSPSGKLMSPKLYVWAKDRPEIWEGEPPCVPPRDSLNQSLSQDLTMAPGSTLWLSCGVPPDSVSRGPLSWTHVHPKGPKSLLSLELKDDRPARDMWVMETGLLLPRATAQDAGKYYCHRGNLTMSFHLEITARPVLWHWLLRTGGWKVSAVTLAYLIFCLCSLVGILHLQRALVLRRKR

SEQ ID NO: 7941 - protein, 419 aa, Artificial Sequence
  source: /note="Description of Artificial Sequence: Synthetic Chimeric Antigen Receptor"
DPAEPKSPDKTHTCPPCPAPELLGGPSVFLFPPKPKDTLMISRTPEVTCVVVDVSHEDPEVKFNWYVDGVEVHNAKTKPREEQYNSTYRVVSVLTVLHQDWLNGKEYKCKVSNKALPAPIEKTISKAKGQPREPQVYTLPPSRDELTKNQVSLTCLVKGFYPSDIAVEWESNGQPENNYKTTPPVLDSDGSFFLYSKLTVDKSRWQQGNVFSCSVMHEALHNHYTQKSLSLSPGKKDPKFWVLVVVGGVLACYSLLVTVAFIIFWVRSKRSRLLHSDYMNMTPRRPGPTRKHYQPYAPPRDFAAYRSRVKFSRSADAPAYQQGQNQLYNELNLGRREEYDVLDKRRGRDPEMGGKPRRKNPQEGLYNELQKDKMAEAYSEIGMKGERRRGKGHDGLYQGLSTATKDTYDALHMQALPPR

SEQ ID NO: 7942 - protein, 200 aa, Artificial Sequence
  source: /note="Description of Artificial Sequence: Synthetic Chimeric Antigen Receptor"
DLEPKSCDKTHTCPPCPDPKFWVLVVVGGVLACYSLLVTVAFIIFWVRSKRSRLLHSDYMNMTPRRPGPTRKHYQPYAPPRDFAAYRSRVKFSRSADAPAYQQGQNQLYNELNLGRREEYDVLDKRRGRDPEMGGKPRRKNPQEGLYNELQKDKMAEAYSEIGMKGERRRGKGHDGLYQGLSTATKDTYDALHMQALPPR

SEQ ID NO: 7943 - protein, 688 aa, Artificial Sequence
  source: /note="Description of Artificial Sequence: Synthetic Chimeric Antigen Receptor"
MDWIWRILFLVGAATGAHSQVQLQQPGAELVRPGASVKLSCKASGYTFSNYLMNWVKQRPEQDLDWIGRIDPYDGDIDYNQNFKDKAILTVDKSSSTAYMQLSSLTSEDSAVYYCARGYGTAYGVDYWGQGTSVTVSSAKTTPPKLEEGEFSEARVDIVLTQSPASLAVSLGQRATISCRASESVDNYGISFMNWFQQKPGQPPKLLIYAASRQGSGVPARFSGSGSGTDFSLNIHPMEEDDTAMYFCQQSKEVPWTFGGGTKLEIKAEDPAEPKSPDKTHTCPPCPAPELLGGPSVFLFPPKPKDTLMISRTPEVTCVVVDVSHEDPEVKFNWYVDGVEVHNAKTKPREEQYNSTYRVVSVLTVLHQDWLNGKEYKCKVSNKALPAPIEKTISKAKGQPREPQVYTLPPSRDELTKNQVSLTCLVKGFYPSDIAVEWESNGQPENNYKTTPPVLDSDGSFFLYSKLTVDKSRWQQGNVFSCSVMHEALHNHYTQKSLSLSPGKKDPKFWVLVVVGGVLACYSLLVTVAFIIFWVRSKRSRLLHSDYMNMTPRRPGPTRKHYQPYAPPRDFAAYRSRVKFSRSADAPAYQQGQNQLYNELNLGRREEYDVLDKRRGRDPEMGGKPRRKNPQEGLYNELQKDKMAEAYSEIGMKGERRRGKGHDGLYQGLSTATKDTYDALHMQALPPR

SEQ ID NO: 7944 - protein, 467 aa, Artificial Sequence
  source: /note="Description of Artificial Sequence: Synthetic Chimeric Antigen Receptor"
MDWIWRILFLVGAATGAHSQVQLQQPGAELVRPGASVKLSCKASGYTFSNYLMNWVKQRPEQDLDWIGRIDPYDGDIDYNQNFKDKAILTVDKSSSTAYMQLSSLTSEDSAVYYCARGYGTAYGVDYWGQGTSVTVSSAKTTPPKLEEGEFSEARVDIVLTQSPASLAVSLGQRATISCRASESVDNYGISFMNWFQQKPGQPPKLLIYAASRQGSGVPARFSGSGSGTDFSLNIHPMEEDDTAMYFCQQSKEVPWTFGGGTKLEIKDLEPKSCDKTHTCPPCPDPKFWVLVVVGGVLACYSLLVTVAFIIFWVRSKRSRLLHSDYMNMTPRRPGPTRKHYQPYAPPRDFAAYRSRVKFSRSADAPAYQQGQNQLYNELNLGRREEYDVLDKRRGRDPEMGGKPRRKNPQEGLYNELQKDKMAEAYSEIGMKGERRRGKGHDGLYQGLSTATKDTYDALHMQALPPR

SEQ ID NO: 7945 - protein, 487 aa, Artificial Sequence
  source: /note="Description of Artificial Sequence: Synthetic Chimeric Antigen Receptor"
MVLLVTSLLLCELPHPAFLLIPDIQQVQLQQSGPELEKPGASVKISCKASGYSFTGYTMNWVKQSHGKSLEWIGLITPYNGASSYNQKFRGKATLTVDKSSSTAYMDLLSLTSEDSAVYFCARGGYDGRGFDYWGQGTTVTVSSGGGGSGGGGSGGGGSDIELTQSPAIMSASPGEKVTMTCSASSSVSYMHWYQQKSGTSPKRWIYDTSKLASGVPGRFSGSGSGNSYSLTISSVEAEDDATYYCQQWSGYPLTFGAGTKLEIKAAAIEVMYPPPYLDNEKSNGTIIHVKGKHLCPSPLFPGPSKPFWVLVVVGGVLACYSLLVTVAFIIFWVRSKRSRLLHSDYMNMTPRRPGPTRKHYQPYAPPRDFAAYRSRVKFSRSADAPAYQQGQNQLYNELNLGRREEYDVLDKRRGRDPEMGGKPRRKNPQEGLYNELQKDKMAEAYSEIGMKGERRRGKGHDGLYQGLSTATKDTYDALHMQALPPR

SEQ ID NO: 7946 - protein, 362 aa, Artificial Sequence
  source: /note="Description of Artificial Sequence: Synthetic Chimeric Antigen Receptor"
MLLLVTSLLLCELPHPAFLLIPGPVPPSTALRYLIEELVNITQNQKAPLCNGSMVWSINLTAGMYCAALESLINVSGCSAIEKTQRMLSGFCPHKVSAGQFSSLHVRDTKIEVAQFVKDLLLHLKKLFREGRFNAKPTTTPAPRPPTPAPTIASQPLSLRPEACRPAAGGAVHTRGLDFACDIYIWAPLAGTCGVLLLSLVITLYKRGRKKLLYIFKQPFMRPVQTTQEEDGCSCRFPEEEEGGCELGGGRVKFSRSADAPAYQQGQNQLYNELNLGRREEYDVLDKRRGRDPEMGGKPRRKNPQEGLYNELQKDKMAEAYSEIGMKGERRRGKGHDGLYQGLSTATKDTYDALHMQALPPR

SEQ ID NO: 7947 - protein, 410 aa, Artificial Sequence
  source: /note="Description of Artificial Sequence: Synthetic Chimeric Antigen Receptor"
MLLLVTSLLLCELPHPAFLLIPGPVPPSTALRYLIEELVNITQNQKAPLCNGSMVWSINLTAGMYCAALESLINVSGCSAIEKTQRMLSGFCPHKVSAGQFSSLHVRDTKIEVAQFVKDLLLHLKKLFREGRFNAKPTTTPAPRPPTPAPTIASQPLSLRPEACRPAAGGAVHTRGLDFACDFWVLVVVGGVLACYSLLVTVAFIIFWVRSKRSRGGHSDYMNMTPRRPGPTRKHYQPYAPPRDFAAYRSGGGKRGRKKLLYIFKQPFMRPVQTTQEEDGCSCRFPEEEEGGCELGGGRVKFSRSADAPAYQQGQNQLYNELNLGRREEYDVLDKRRGRDPEMGGKPRRKNPQEGLYNELQKDKMAEAYSEIGMKGERRRGKGHDGLYQGLSTATKDTYDALHMQALPPR

SEQ ID NO: 7948 - protein, 442 aa, Artificial Sequence
  source: /note="Description of Artificial Sequence: Synthetic Chimeric Antigen Receptor"
MLLLVTSLLLCELPHPAFLLIPGPVPPSTALRYLIEELVNITQNQKAPLCNGSMVWSINLTAGMYCAALESLINVSGCSAIEKTQRMLSGFCPHKVSAGQFSSLHVRDTKIEVAQFVKDLLLHLKKLFREGRFNESKYGPPCPPCPGGGSSGGGSGGQPREPQVYTLPPSQEEMTKNQVSLTCLVKGFYPSDIAVEWESNGQPENNYKTTPPVLDSDGSFFLYSRLTVDKSRWQEGNVFSCSVMHEALHNHYTQKSLSLSLGKMALIVLGGVAGLLLFIGLGIFFKRGRKKLLYIFKQPFMRPVQTTQEEDGCSCRFPEEEEGGCELGGGRVKFSRSADAPAYQQGQNQLYNELNLGRREEYDVLDKRRGRDPEMGGKPRRKNPQEGLYNELQKDKMAEAYSEIGMKGERRRGKGHDGLYQGLSTATKDTYDALHMQALPPR

SEQ ID NO: 7949 - protein, 541 aa, Artificial Sequence
  source: /note="Description of Artificial Sequence: Synthetic Chimeric Antigen Receptor"
MLLLVTSLLLCELPHPAFLLIPGPVPPSTALRYLIEELVNITQNQKAPLCNGSMVWSINLTAGMYCAALESLINVSGCSAIEKTQRMLSGFCPHKVSAGQFSSLHVRDTKIEVAQFVKDLLLHLKKLFREGRFNESKYGPPCPPCPAPEFEGGPSVFLFPPKPKDTLMISRTPEVTCVVVDVSQEDPEVQFNWYVDGVEVHNAKTKPREEQFQSTYRVVSVLTVLHQDWLNGKEYKCKVSNKGLPSSIEKTISKAKGQPREPQVYTLPPSQEEMTKNQVSLTCLVKGFYPSDIAVEWESNGQPENNYKTTPPVLDSDGSFFLYSRLTVDKSRWQEGNVFSCSVMHEALHNHYTQKSLSLSLGKIYIWAPLAGTCGVLLLSLVITKRGRKKLLYIFKQPFMRPVQTTQEEDGCSCRFPEEEEGGCELGGGRVKFSRSADAPAYQQGQNQLYNELNLGRREEYDVLDKRRGRDPEMGGKPRRKNPQEGLYNELQKDKMAEAYSEIGMKGERRRGKGHDGLYQGLSTATKDTYDALHMQALPPR

SEQ ID NO: 7950 - protein, 373 aa, Artificial Sequence
  source: /note="Description of Artificial Sequence: Synthetic Chimeric Antigen Receptor"
MLLLVTSLLLCELPHPAFLLIPGPVPPSTALRYLIEELVNITQNQKAPLCNGSMVWSINLTAGMYCAALESLINVSGCSAIEKTQRMLSGFCPHKVSAGQFSSLHVRDTKIEVAQFVKDLLLHLKKLFREGRFNGGGSSGGGSGMFWVLVVVGGVLACYSLLVTVAFIIFWVRSKRSRGGHSDYMNMTPRRPGPTRKHYQPYAPPRDFAAYRSGGGKRGRKKLLYIFKQPFMRPVQTTQEEDGCSCRFPEEEEGGCELGGGRVKFSRSADAPAYQQGQNQLYNELNLGRREEYDVLDKRRGRDPEMGGKPRRKNPQEGLYNELQKDKMAEAYSEIGMKGERRRGKGHDGLYQGLSTATKDTYDALHMQALPPR

SEQ ID NO: 7951 - protein, 385 aa, Artificial Sequence
  source: /note="Description of Artificial Sequence: Synthetic Chimeric Antigen Receptor"
MLLLVTSLLLCELPHPAFLLIPGPVPPSTALRYLIEELVNITQNQKAPLCNGSMVWSINLTAGMYCAALESLINVSGCSAIEKTQRMLSGFCPHKVSAGQFSSLHVRDTKIEVAQFVKDLLLHLKKLFREGRFNESKYGPPCPPCPGGGSSGGGSGMFWVLVVVGGVLACYSLLVTVAFIIFWVRSKRSRGGHSDYMNMTPRRPGPTRKHYQPYAPPRDFAAYRSGGGKRGRKKLLYIFKQPFMRPVQTTQEEDGCSCRFPEEEEGGCELGGGRVKFSRSADAPAYQQGQNQLYNELNLGRREEYDVLDKRRGRDPEMGGKPRRKNPQEGLYNELQKDKMAEAYSEIGMKGERRRGKGHDGLYQGLSTATKDTYDALHMQALPPR

SEQ ID NO: 7952 - protein, 492 aa, Artificial Sequence
  source: /note="Description of Artificial Sequence: Synthetic Chimeric Antigen Receptor"
MLLLVTSLLLCELPHPAFLLIPGPVPPSTALRYLIEELVNITQNQKAPLCNGSMVWSINLTAGMYCAALESLINVSGCSAIEKTQRMLSGFCPHKVSAGQFSSLHVRDTKIEVAQFVKDLLLHLKKLFREGRFNESKYGPPCPPCPGGGSSGGGSGGQPREPQVYTLPPSQEEMTKNQVSLTCLVKGFYPSDIAVEWESNGQPENNYKTTPPVLDSDGSFFLYSRLTVDKSRWQEGNVFSCSVMHEALHNHYTQKSLSLSLGKMFWVLVVVGGVLACYSLLVTVAFIIFWVRSKRSRGGHSDYMNMTPRRPGPTRKHYQPYAPPRDFAAYRSGGGKRGRKKLLYIFKQPFMRPVQTTQEEDGCSCRFPEEEEGGCELGGGRVKFSRSADAPAYQQGQNQLYNELNLGRREEYDVLDKRRGRDPEMGGKPRRKNPQEGLYNELQKDKMAEAYSEIGMKGERRRGKGHDGLYQGLSTATKDTYDALHMQALPPR

SEQ ID NO: 7953 - protein, 592 aa, Artificial Sequence
  source: /note="Description of Artificial Sequence: Synthetic Chimeric Antigen Receptor"
MLLLVTSLLLCELPHPAFLLIPGPVPPSTALRYLIEELVNITQNQKAPLCNGSMVWSINLTAGMYCAALESLINVSGCSAIEKTQRMLSGFCPHKVSAGQFSSLHVRDTKIEVAQFVKDLLLHLKKLFREGRFNESKYGPPCPPCPAPEFEGGPSVFLFPPKPKDTLMISRTPEVTCVVVDVSQEDPEVQFNWYVDGVEVHNAKTKPREEQFQSTYRVVSVLTVLHQDWLNGKEYKCKVSNKGLPSSIEKTISKAKGQPREPQVYTLPPSQEEMTKNQVSLTCLVKGFYPSDIAVEWESNGQPENNYKTTPPVLDSDGSFFLYSRLTVDKSRWQEGNVFSCSVMHEALHNHYTQKSLSLSLGKMFWVLVVVGGVLACYSLLVTVAFIIFWVRSKRSRGGHSDYMNMTPRRPGPTRKHYQPYAPPRDFAAYRSGGGKRGRKKLLYIFKQPFMRPVQTTQEEDGCSCRFPEEEEGGCELGGGRVKFSRSADAPAYQQGQNQLYNELNLGRREEYDVLDKRRGRDPEMGGKPRRKNPQEGLYNELQKDKMAEAYSEIGMKGERRRGKGHDGLYQGLSTATKDTYDALHMQALPPR

SEQ ID NO: 7954 - protein, 340 aa, Artificial Sequence
  source: /note="Description of Artificial Sequence: Synthetic Chimeric Antigen Receptor"
GPVPPSTALRYLIEELVNITQNQKAPLCNGSMVWSINLTAGMYCAALESLINVSGCSAIEKTQRMLSGFCPHKVSAGQFSSLHVRDTKIEVAQFVKDLLLHLKKLFREGRFNAKPTTTPAPRPPTPAPTIASQPLSLRPEACRPAAGGAVHTRGLDFACDIYIWAPLAGTCGVLLLSLVITLYKRGRKKLLYIFKQPFMRPVQTTQEEDGCSCRFPEEEEGGCELGGGRVKFSRSADAPAYQQGQNQLYNELNLGRREEYDVLDKRRGRDPEMGGKPRRKNPQEGLYNELQKDKMAEAYSEIGMKGERRRGKGHDGLYQGLSTATKDTYDALHMQALPPR

SEQ ID NO: 7955 - protein, 388 aa, Artificial Sequence
  source: /note="Description of Artificial Sequence: Synthetic Chimeric Antigen Receptor"
GPVPPSTALRYLIEELVNITQNQKAPLCNGSMVWSINLTAGMYCAALESLINVSGCSAIEKTQRMLSGFCPHKVSAGQFSSLHVRDTKIEVAQFVKDLLLHLKKLFREGRFNAKPTTTPAPRPPTPAPTIASQPLSLRPEACRPAAGGAVHTRGLDFACDFWVLVVVGGVLACYSLLVTVAFIIFWVRSKRSRGGHSDYMNMTPRRPGPTRKHYQPYAPPRDFAAYRSGGGKRGRKKLLYIFKQPFMRPVQTTQEEDGCSCRFPEEEEGGCELGGGRVKFSRSADAPAYQQGQNQLYNELNLGRREEYDVLDKRRGRDPEMGGKPRRKNPQEGLYNELQKDKMAEAYSEIGMKGERRRGKGHDGLYQGLSTATKDTYDALHMQALPPR

SEQ ID NO: 7956 - protein, 420 aa, Artificial Sequence
  source: /note="Description of Artificial Sequence: Synthetic Chimeric Antigen Receptor"
GPVPPSTALRYLIEELVNITQNQKAPLCNGSMVWSINLTAGMYCAALESLINVSGCSAIEKTQRMLSGFCPHKVSAGQFSSLHVRDTKIEVAQFVKDLLLHLKKLFREGRFNESKYGPPCPPCPGGGSSGGGSGGQPREPQVYTLPPSQEEMTKNQVSLTCLVKGFYPSDIAVEWESNGQPENNYKTTPPVLDSDGSFFLYSRLTVDKSRWQEGNVFSCSVMHEALHNHYTQKSLSLSLGKMALIVLGGVAGLLLFIGLGIFFKRGRKKLLYIFKQPFMRPVQTTQEEDGCSCRFPEEEEGGCELGGGRVKFSRSADAPAYQQGQNQLYNELNLGRREEYDVLDKRRGRDPEMGGKPRRKNPQEGLYNELQKDKMAEAYSEIGMKGERRRGKGHDGLYQGLSTATKDTYDALHMQALPPR

SEQ ID NO: 7957 - protein, 519 aa, Artificial Sequence
  source: /note="Description of Artificial Sequence: Synthetic Chimeric Antigen Receptor"
GPVPPSTALRYLIEELVNITQNQKAPLCNGSMVWSINLTAGMYCAALESLINVSGCSAIEKTQRMLSGFCPHKVSAGQFSSLHVRDTKIEVAQFVKDLLLHLKKLFREGRFNESKYGPPCPPCPAPEFEGGPSVFLFPPKPKDTLMISRTPEVTCVVVDVSQEDPEVQFNWYVDGVEVHNAKTKPREEQFQSTYRVVSVLTVLHQDWLNGKEYKCKVSNKGLPSSIEKTISKAKGQPREPQVYTLPPSQEEMTKNQVSLTCLVKGFYPSDIAVEWESNGQPENNYKTTPPVLDSDGSFFLYSRLTVDKSRWQEGNVFSCSVMHEALHNHYTQKSLSLSLGKIYIWAPLAGTCGVLLLSLVITKRGRKKLLYIFKQPFMRPVQTTQEEDGCSCRFPEEEEGGCELGGGRVKFSRSADAPAYQQGQNQLYNELNLGRREEYDVLDKRRGRDPEMGGKPRRKNPQEGLYNELQKDKMAEAYSEIGMKGERRRGKGHDGLYQGLSTATKDTYDALHMQALPPR

SEQ ID NO: 7958 - protein, 351 aa, Artificial Sequence
  source: /note="Description of Artificial Sequence: Synthetic Chimeric Antigen Receptor"
GPVPPSTALRYLIEELVNITQNQKAPLCNGSMVWSINLTAGMYCAALESLINVSGCSAIEKTQRMLSGFCPHKVSAGQFSSLHVRDTKIEVAQFVKDLLLHLKKLFREGRFNGGGSSGGGSGMFWVLVVVGGVLACYSLLVTVAFIIFWVRSKRSRGGHSDYMNMTPRRPGPTRKHYQPYAPPRDFAAYRSGGGKRGRKKLLYIFKQPFMRPVQTTQEEDGCSCRFPEEEEGGCELGGGRVKFSRSADAPAYQQGQNQLYNELNLGRREEYDVLDKRRGRDPEMGGKPRRKNPQEGLYNELQKDKMAEAYSEIGMKGERRRGKGHDGLYQGLSTATKDTYDALHMQALPPR

SEQ ID NO: 7959 - protein, 363 aa, Artificial Sequence
  source: /note="Description of Artificial Sequence: Synthetic Chimeric Antigen Receptor"
GPVPPSTALRYLIEELVNITQNQKAPLCNGSMVWSINLTAGMYCAALESLINVSGCSAIEKTQRMLSGFCPHKVSAGQFSSLHVRDTKIEVAQFVKDLLLHLKKLFREGRFNESKYGPPCPPCPGGGSSGGGSGMFWVLVVVGGVLACYSLLVTVAFIIFWVRSKRSRGGHSDYMNMTPRRPGPTRKHYQPYAPPRDFAAYRSGGGKRGRKKLLYIFKQPFMRPVQTTQEEDGCSCRFPEEEEGGCELGGGRVKFSRSADAPAYQQGQNQLYNELNLGRREEYDVLDKRRGRDPEMGGKPRRKNPQEGLYNELQKDKMAEAYSEIGMKGERRRGKGHDGLYQGLSTATKDTYDALHMQALPPR

SEQ ID NO: 7960 - protein, 470 aa, Artificial Sequence
  source: /note="Description of Artificial Sequence: Synthetic Chimeric Antigen Receptor"
GPVPPSTALRYLIEELVNITQNQKAPLCNGSMVWSINLTAGMYCAALESLINVSGCSAIEKTQRMLSGFCPHKVSAGQFSSLHVRDTKIEVAQFVKDLLLHLKKLFREGRFNESKYGPPCPPCPGGGSSGGGSGGQPREPQVYTLPPSQEEMTKNQVSLTCLVKGFYPSDIAVEWESNGQPENNYKTTPPVLDSDGSFFLYSRLTVDKSRWQEGNVFSCSVMHEALHNHYTQKSLSLSLGKMFWVLVVVGGVLACYSLLVTVAFIIFWVRSKRSRGGHSDYMNMTPRRPGPTRKHYQPYAPPRDFAAYRSGGGKRGRKKLLYIFKQPFMRPVQTTQEEDGCSCRFPEEEEGGCELGGGRVKFSRSADAPAYQQGQNQLYNELNLGRREEYDVLDKRRGRDPEMGGKPRRKNPQEGLYNELQKDKMAEAYSEIGMKGERRRGKGHDGLYQGLSTATKDTYDALHMQALPPR

SEQ ID NO: 7961 - protein, 570 aa, Artificial Sequence
  source: /note="Description of Artificial Sequence: Synthetic Chimeric Antigen Receptor"
GPVPPSTALRYLIEELVNITQNQKAPLCNGSMVWSINLTAGMYCAALESLINVSGCSAIEKTQRMLSGFCPHKVSAGQFSSLHVRDTKIEVAQFVKDLLLHLKKLFREGRFNESKYGPPCPPCPAPEFEGGPSVFLFPPKPKDTLMISRTPEVTCVVVDVSQEDPEVQFNWYVDGVEVHNAKTKPREEQFQSTYRVVSVLTVLHQDWLNGKEYKCKVSNKGLPSSIEKTISKAKGQPREPQVYTLPPSQEEMTKNQVSLTCLVKGFYPSDIAVEWESNGQPENNYKTTPPVLDSDGSFFLYSRLTVDKSRWQEGNVFSCSVMHEALHNHYTQKSLSLSLGKMFWVLVVVGGVLACYSLLVTVAFIIFWVRSKRSRGGHSDYMNMTPRRPGPTRKHYQPYAPPRDFAAYRSGGGKRGRKKLLYIFKQPFMRPVQTTQEEDGCSCRFPEEEEGGCELGGGRVKFSRSADAPAYQQGQNQLYNELNLGRREEYDVLDKRRGRDPEMGGKPRRKNPQEGLYNELQKDKMAEAYSEIGMKGERRRGKGHDGLYQGLSTATKDTYDALHMQALPPR

SEQ ID NO: 7962 - protein, 363 aa, Artificial Sequence
  source: /note="Description of Artificial Sequence: Synthetic Chimeric Antigen Receptor"
MLLLVTSLLLCELPHPAFLLIPGPVPPSTALRYLIEELVNITQNQKAPLCNGSMVWSINLTAGMYCAALESLINVSGCSAIEKTQRMLSGFCPHKVSAGQFSSLHVRDTKIEVAQFVKDLLLHLKKLFREGRFNAKPTTTPAPRPPTPAPTIASQPLSLRPEACRPAAGGAVHTRGLDFACDIYIWAPLAGTCGVLLLSLVITGGGKRGRKKLLYIFKQPFMRPVQTTQEEDGCSCRFPEEEEGGCELGGGRVKFSRSADAPAYQQGQNQLYNELNLGRREEYDVLDKRRGRDPEMGGKPRRKNPQEGLYNELQKDKMAEAYSEIGMKGERRRGKGHDGLYQGLSTATKDTYDALHMQALPPR

SEQ ID NO: 7963 - protein, 341 aa, Artificial Sequence
  source: /note="Description of Artificial Sequence: Synthetic Chimeric Antigen Receptor"
GPVPPSTALRYLIEELVNITQNQKAPLCNGSMVWSINLTAGMYCAALESLINVSGCSAIEKTQRMLSGFCPHKVSAGQFSSLHVRDTKIEVAQFVKDLLLHLKKLFREGRFNAKPTTTPAPRPPTPAPTIASQPLSLRPEACRPAAGGAVHTRGLDFACDIYIWAPLAGTCGVLLLSLVITGGGKRGRKKLLYIFKQPFMRPVQTTQEEDGCSCRFPEEEEGGCELGGGRVKFSRSADAPAYQQGQNQLYNELNLGRREEYDVLDKRRGRDPEMGGKPRRKNPQEGLYNELQKDKMAEAYSEIGMKGERRRGKGHDGLYQGLSTATKDTYDALHMQALPPR

SEQ ID NO: 7964 - protein, 688 aa, Artificial Sequence
  source: /note="Description of Artificial Sequence: Synthetic Chimeric Antigen Receptor"
MEFGLSWLFLVAILKGVQCSRDIVMTQSQKFMSTSVGDRVSVTCKASQNVGTNVAWYQQKPGQSPKALIYSTSYRYSGVPDRFTGSGSGTDFTLTISNVQSEDLAEYFCQQYNSYPYTFGGGTKLEIKGGGGSGGGGSGGGGSEVQLQQSGAELVKPGASVKLSCTASGFNIKDTYMHWVKQRPEQGLEWIGRIDPANGNTKYDPKFQGKATIIADTSSNTAYLQLSSLTSEDTAVYYCARGVYHDYDGDYWGQGTTLTVSSYVTVSSQDPAEPKSPDKTHTCPPCPAPELLGGPSVFLFPPKPKDTLMISRTPEVTCVVVDVSHEDPEVKFNWYVDGVEVHNAKTKPREEQYNSTYRVVSVLTVLHQDWLNGKEYKCKVSNKALPAPIEKTISKAKGQPREPQVYTLPPSRDELTKNQVSLTCLVKGFYPSDIAVEWESNGQPENNYKTTPPVLDSDGSFFLYSKLTVDKSRWQQGNVFSCSVMHEALHNHYTQKSLSLSPGKKDPKFWVLVVVGGVLACYSLLVTVAFIIFWVRSKRSRLLHSDYMNMTPRRPGPTRKHYQPYAPPRDFAAYRSRVKFSRSADAPAYQQGQNQLYNELNLGRREEYDVLDKRRGRDPEMGGKPRRKNPQEGLYNELQKDKMAEAYSEIGMKGERRRGKGHDGLYQGLSTATKDTYDALHMQALPPR

SEQ ID NO: 7965 - protein, 488 aa, Artificial Sequence
  source: /note="Description of Artificial Sequence: Synthetic Chimeric Antigen Receptor"
MALPVTALLLPLALLLHAARPGSQVQLQQSGPELEKPGASVKISCKASGYSFTGYTMNWVKQSHGKSLEWIGLITPYNGASSYNQKFRGKATLTVDKSSSTAYMDLLSLTSEDSAVYFCARGGYDGRGFDYWGQGTTVTVSSGGGGSGGGGSSGGGSDIELTQSPAIMSASPGEKVTMTCSASSSVSYMHWYQQKSGTSPKRWIYDTSKLASGVPGRFSGSGSGNSYSLTISSVEAEDDATYYCQQWSKHPLTYGAGTKLEIKASTTTPAPRPPTPAPTIASQPLSLRPEACRPAAGGAVHTRGLDFACDIYIWAPLAGTCGVLLLSLVITLYCKRGRKKLLYIFKQPFMRPVQTTQEEDGCSCRFPEEEEGGCELRVKFSRSADAPAYKQGQNQLYNELNLGRREEYDVLDKRRGRDPEMGGKPRRKNPQEGLYNELQKDKMAEAYSEIGMKGERRRGKGHDGLYQGLSTATKDTYDALHMQALPPR

SEQ ID NO: 7966 - protein, 551 aa, Artificial Sequence
  source: /note="Description of Artificial Sequence: Synthetic Chimeric Antigen Receptor"
MVLLVTSLLLCELPHPAFLLIPDIQQVQLQQSGPELEKPGASVKISCKASGYSFTGYTMNWVKQSHGKSLEWIGLITPYNGASSYNQKFRGKATLTVDKSSSTAYMDLLSLTSEDSAVYFCARGGYDGRGFDYWGQGTTVTVSSGGGGSGGGGSGGGGSDIELTQSPAIMSASPGEKVTMTCSASSSVSYMHWYQQKSGTSPKRWIYDTSKLASGVPGRFSGSGSGNSYSLTISSVEAEDDATYYCQQWSGYPLTFGAGTKLEIKAAAFVPVFLPAKPTTTPAPRPPTPAPTIASQPLSLRPEACRPAAGGAVHTRGLDFACDIYIWAPLAGTCGVLLLSLVITLYCNHRNRSKRSRLLHSDYMNMTPRRPGPTRKHYQPYAPPRDFAAYRSRFSVVKRGRKKLLYIFKQPFMRPVQTTQEEDGCSCRFPEEEEGGCELRVKFSRSADAPAYQQGQNQLYNELNLGRREEYDVLDKRRGRDPEMGGKPRRKNPQEGLYNELQKDKMAEAYSEIGMKGERRRGKGHDGLYQGLSTATKDTYDALHMQALPPR

SEQ ID NO: 7967 - protein, 487 aa, Artificial Sequence
  source: /note="Description of Artificial Sequence: Synthetic Chimeric Antigen Receptor"
MVLLVTSLLLCELPHPAFLLIPDIQQVQLQQSGPELEKPGASVKISCKASGYSFTGYTMNWVKQSHGKSLEWIGLITPYNGASSYNQKFRGKATLTVDKSSSTAYMDLLSLTSEDSAVYFCARGGYDGRGFDYWGQGTTVTVSSGGGGSGGGGSSGGGSDIELTQSPAIMSASPGEKVTMTCSASSSVSYMHWYQQKSGTSPKRWIYDTSKLASGVPGRFSGSGSGNSYSLTISSVEAEDDATYYCQQWSKHPLTFGAGTKLEIKAAAIEVMYPPPYLDNEKSNGTIIHVKGKHLCPSPLFPGPSKPFWVLVVVGGVLACYSLLVTVAFIIFWVRSKRSRLLHSDYMNMTPRRPGPTRKHYQPYAPPRDFAAYRSRVKFSRSADAPAYQQGQNQLYNELNLGRREEYDVLDKRRGRDPEMGGKPRRKNPQEGLYNELQKDKMAEAYSEIGMKGERRRGKGHDGLYQGLSTATKDTYDALHMQALPPR

SEQ ID NO: 7968 - protein, 551 aa, Artificial Sequence
  source: /note="Description of Artificial Sequence: Synthetic Chimeric Antigen Receptor"
MVLLVTSLLLCELPHPAFLLIPDIQQVQLQQSGPELEKPGASVKISCKASGYSFTGYTMNWVKQSHGKSLEWIGLITPYNGASSYNQKFRGKATLTVDKSSSTAYMDLLSLTSEDSAVYFCARGGYDGRGFDYWGQGTTVTVSSGGGGSGGGGSSGGGSDIELTQSPAIMSASPGEKVTMTCSASSSVSYMHWYQQKSGTSPKRWIYDTSKLASGVPGRFSGSGSGNSYSLTISSVEAEDDATYYCQQWSKHPLTFGAGTKLEIKAAAFVPVFLPAKPTTTPAPRPPTPAPTIASQPLSLRPEACRPAAGGAVHTRGLDFACDIYIWAPLAGTCGVLLLSLVITLYCNHRNRSKRSRLLHSDYMNMTPRRPGPTRKHYQPYAPPRDFAAYRSRFSVVKRGRKKLLYIFKQPFMRPVQTTQEEDGCSCRFPEEEEGGCELRVKFSRSADAPAYQQGQNQLYNELNLGRREEYDVLDKRRGRDPEMGGKPRRKNPQEGLYNELQKDKMAEAYSEIGMKGERRRGKGHDGLYQGLSTATKDTYDALHMQALPPR

SEQ ID NO: 7969 - protein, 490 aa, Artificial Sequence
  source: /note="Description of Artificial Sequence: Synthetic Chimeric Antigen Receptor"
MVLLVTSLLLCELPHPAFLLIPDIQAQVQLVQSGAEVKRPGASVQVSCRASGYSINTYYMQWVRQAPGAGLEWMGVINPSGVTSYAQKFQGRVTLTNDTSTNTVYMQLNSLTSADTAVYYCARWALWGDFGMDVWGKGTLVTVSSGGGGSGGGGSGGGGSDIQMTQSPSTLSASIGDRVTITCRASEGIYHWLAWYQQKPGKAPKLLIYKASSLASGAPSRFSGSGSGTDFTLTISSLQPDDFATYYCQQYSNYPLTFGGGTKLEIKRAAAIEVMYPPPYLDNEKSNGTIIHVKGKHLCPSPLFPGPSKPFWVLVVVGGVLACYSLLVTVAFIIFWVRSKRSRLLHSDYMNMTPRRPGPTRKHYQPYAPPRDFAAYRSRVKFSRSADAPAYQQGQNQLYNELNLGRREEYDVLDKRRGRDPEMGGKPRRKNPQEGLYNELQKDKMAEAYSEIGMKGERRRGKGHDGLYQGLSTATKDTYDALHMQALPPR

SEQ ID NO: 7970 - protein, 554 aa, Artificial Sequence
  source: /note="Description of Artificial Sequence: Synthetic Chimeric Antigen Receptor"
MVLLVTSLLLCELPHPAFLLIPDIQAQVQLVQSGAEVKRPGASVQVSCRASGYSINTYYMQWVRQAPGAGLEWMGVINPSGVTSYAQKFQGRVTLTNDTSTNTVYMQLNSLTSADTAVYYCARWALWGDFGMDVWGKGTLVTVSSGGGGSGGGGSGGGGSDIQMTQSPSTLSASIGDRVTITCRASEGIYHWLAWYQQKPGKAPKLLIYKASSLASGAPSRFSGSGSGTDFTLTISSLQPDDFATYYCQQYSNYPLTFGGGTKLEIKRAAAFVPVFLPAKPTTTPAPRPPTPAPTIASQPLSLRPEACRPAAGGAVHTRGLDFACDIYIWAPLAGTCGVLLLSLVITLYCNHRNRSKRSRLLHSDYMNMTPRRPGPTRKHYQPYAPPRDFAAYRSRFSVVKRGRKKLLYIFKQPFMRPVQTTQEEDGCSCRFPEEEEGGCELRVKFSRSADAPAYQQGQNQLYNELNLGRREEYDVLDKRRGRDPEMGGKPRRKNPQEGLYNELQKDKMAEAYSEIGMKGERRRGKGHDGLYQGLSTATKDTYDALHMQALPPR

SEQ ID NO: 7971 - protein, 464 aa, Artificial Sequence
  source: /note="Description of Artificial Sequence: Synthetic Chimeric Antigen Receptor"
MALPVTALLLPLALLLHAARPGSQVQLQQSGPGLVTPSQTLSLTCAISGDSVSSNSATWNWIRQSPSRGLEWLGRTYYRSKWYNDYAVSVKSRMSINPDTSKNQFSLQLNSVTPEDTAVYYCARGMMTYYYGMDVWGQGTTVTVSSGILGSGGGGSGGGGSGGGGSQPVLTQSSSLSASPGASASLTCTLRSGINVGPYRIYWYQQKPGSPPQYLLNYKSDSDKQQGSGVPSRFSGSKDASANAGVLLISGLRSEDEADYYCMIWHSSAAVFGGGTQLTVLSASTTTPAPRPPTPAPTIASRPLSLRPEACRPAAGGAVHTRGLDFACDIYIWAPLAGTCGVLLLSLVITLYCRVKFSRSADAPAYQQGQNQLYNELNLGRREEYDVLDKRRGRDPEMGGKPRRKNPQEGLYNELQKDKMAEAYSEIGMKGERRGKGHDGLYQGLSTARKDTYDALHMQALPPT

SEQ ID NO: 7972 - protein, 511 aa, Artificial Sequence
  source: /note="Description of Artificial Sequence: Synthetic Chimeric Antigen Receptor"
MALPVTALLLPLALLLHAARPGSQVQLQQSGPGLVTPSQTLSLTCAISGDSVSSNSATWNWIRQSPSRGLEWLGRTYYRSKWYNDYAVSVKSRMSINPDTSKNQFSLQLNSVTPEDTAVYYCARGMMTYYYGMDVWGQGTTVTVSSGILGSGGGGSGGGGSGGGGSQPVLTQSSSLSASPGASASLTCTLRSGINVGPYRIYWYQQKPGSPPQYLLNYKSDSDKQQGSGVPSRFSGSKDASANAGVLLISGLRSEDEADYYCMIWHSSAAVFGGGTQLTVLSASTTTPAPRPPTPAPTIASQPLSLRPEACRPAAGGAVHTRGLDFACDFWVLVVVGGVLACYSLLVTVAFIIFWVRSKRSRLLHSDYMNMTPRRPGPTRKHYQPYAPPRDFAAYRSIDRVKFSRSADAPAYQQGQNQLYNELNLGRREEYDVLDKRRGRDPEMGGKPRRKNPQEGLYNELQKDKMAEAYSEIGMKGERRRGKGHDGLYQGLSTATKDTYDALHMQALPPR

SEQ ID NO: 7973 - protein, 507 aa, Artificial Sequence
  source: /note="Description of Artificial Sequence: Synthetic Chimeric Antigen Receptor"
MALPVTALLLPLALLLHAARPGSQVQLQQSGPGLVTPSQTLSLTCAISGDSVSSNSATWNWIRQSPSRGLEWLGRTYYRSKWYNDYAVSVKSRMSINPDTSKNQFSLQLNSVTPEDTAVYYCARGMMTYYYGMDVWGQGTTVTVSSGILGSGGGGSGGGGSGGGGSQPVLTQSSSLSASPGASASLTCTLRSGINVGPYRIYWYQQKPGSPPQYLLNYKSDSDKQQGSGVPSRFSGSKDASANAGVLLISGLRSEDEADYYCMIWHSSAAVFGGGTQLTVLSASTTTPAPRPPTPAPTIASQPLSLRPEACRPAAGGAVHTRGLDFACDIYIWAPLAGTCGVLLLSLVITLYCKRGRKKLLYIFKQPFMRPVQTTQEEDGCSCRFPEEEEGGCELRVKFSRSADAPAYKQGQNQLYNELNLGRREEYDVLDKRRGRDPEMGGKPRRKNPQEGLYNELQKDKMAEAYSEIGMKGERRRGKGHDGLYQGLSTATKDTYDALHMQALPPR

SEQ ID NO: 7974 - protein, 445 aa, Artificial Sequence
  source: /note="Description of Artificial Sequence: Synthetic Chimeric Antigen Receptor"
MALPVTALLLPLALLLHAARPEVQLVESGGGLVKPGGSLRLSCAASGFTFSRYGMSWVRQAPGKRLEWVSTISGGGTYIYYPDSVKGRFTISRDNAKNTLYLQMNSLRAEDTAVYYCTRDNYGRNYDYGMDYWGQGTLVTVSSGGGGSGGGGSGGGGSEIVLTQSPATLSLSPGERATLTCSATSSVSYIHWYQQRPGQSPRLLIYSTSNLASGIPARFSGSGSGSDYTLTISSLEPEDFAVYYCQQRSSSPFTFGSGTKVEIKTTTPAPRPPTPAPTIASQPLSLRPEACRPAAGGAVHTRGLDFACDIYIWAPLAGTCGVLLLSLVITLYCRVKFSRSADAPAYKQGQNQLYNELNLGRREEYDVLDKRRGRDPEMGGKPRRKNPQEGLYNELQKDKMAEAYSEIGMKGERRRGKGHDGLYQGLSTATKDTYDALHMQALPPR

SEQ ID NO: 7975 - protein, 738 aa, Artificial Sequence
  source: /note="Description of Artificial Sequence: Synthetic Chimeric Antigen Receptor"
MALPVTALLLPLALLLHAARPEVQLQQSGGERATPGASVKMSCKTSGYTFTNYWMHWVKQRPGQGLEWIGYINPSSGYTQYNQKFKDKATLTADKSSSTAYIQLSSLTSEDSAVYYCSTYYGDYLFPYWGQGTLVTVSAGGGGSGGGGSGGGGSDVLMTQTPLSLPVSLGDQASISCRSSQDIVYGNGNTYLEWYLQKPGQSPKLLIYKVSNRFSGVPDRFSGSGSGTDFTLKISRVEAEDLGVYYCFQGSHVPYTFGGGTKLEIKRAAAIEVEQKLISEEDLLDNEKSNGTIIHVKGKHLCPSPLFPGPSKPFWVLVVVGGVLACYSLLVTVAFIIFWVRSKRSRLLHSDYMNMTPRRPGPTRKHYQPYAPPRDFAAYRSRVKFSRSADAPAYQQGQNQLYNELNLGRREEYDVLDKRRGRDPEMGGKPRRKNPQEGLYNELQKDKMAEAYSEIGMKGERRRGKGHDGLYQGLSTATKDTYDALHMQALPPRARGAAAGAGGAGRMVSELIKENMHMKLYMEGTVNNHHFKCTSEGEGKPYEGTQTMRIKAVEGGPLPFAFDILATSFMYGSKTFINHTQGIPDFFKQSFPEGFTWERVTTYEDGGVLTATQDTSLQDGCLIYNVKIRGVNFPSNGPVMQKKTLGWEASTETLYPADGGLEGRADMALKLVGGGHLICNLKTTYRSKKPAKNLKMPGVYYVDRRLERIKEADKETYVEQHEVAVARYCDLPSKLGHR

SEQ ID NO: 7976 - protein, 555 aa, Artificial Sequence
  source: /note="Description of Artificial Sequence: Synthetic Chimeric Antigen Receptor"
MALPVTALLLPLALLLHAARPEVQLQQSGGERATPGASVKMSCKTSGYTFTNYWMHWVKQRPGQGLEWIGYINPSSGYTQYNQKFKDKATLTADKSSSTAYIQLSSLTSEDSAVYYCSTYYGDYLFPYWGQGTLVTVSAGGGGSGGGGSGGGGSDVLMTQTPLSLPVSLGDQASISCRSSQDIVYGNGNTYLEWYLQKPGQSPKLLIYKVSNRFSGVPDRFSGSGSGTDFTLKISRVEAEDLGVYYCFQGSHVPYTFGGGTKLEIKRAAAIEVEQKLISEEDLLDNEKSNGTIIHVKGKHLCPSPLFPGPSKPFWVLVVVGGVLACYSLLVTVAFIIFWVRSKRSRLLHSDYMNMTPRRPGPTRKHYQPYAPPRDFAAYRSRDQRLPPDAHKPPGECLMALPHCSWRVRPTHQSLLFSSPGGGSFRTPIQEEQADAHSTLAKIRVKFSRSADAPAYQQGQNQLYNELNLGRREEYDVLDKRRGRDPEMGGKPRRKNPQEGLYNELQKDKMAEAYSEIGMKGERRRGKGHDGLYQGLSTATKDTYDALHMQALPPR

SEQ ID NO: 7977 - protein, 535 aa, Artificial Sequence
  source: /note="Description of Artificial Sequence: Synthetic Chimeric Antigen Receptor"
MALPVTALLLPLALLLHAARPEVQLQQSGGERATPGASVKMSCKTSGYTFTNYWMHWVKQRPGQGLEWIGYINPSSGYTQYNQKFKDKATLTADKSSSTAYIQLSSLTSEDSAVYYCSTYYGDYLFPYWGQGTLVTVSAGGGGSGGGGSGGGGSDVLMTQTPLSLPVSLGDQASISCRSSQDIVYGNGNTYLEWYLQKPGQSPKLLIYKVSNRFSGVPDRFSGSGSGTDFTLKISRVEAEDLGVYYCFQGSHVPYTFGGGTKLEIKRAAAIEVEQKLISEEDLLDNEKSNGTIIHVKGKHLCPSPLFPGPSKPFWVLVVVGGVLACYSLLVTVAFIIFWVRSKRSRLLHSDYMNMTPRRPGPTRKHYQPYAPPRDFAAYRSKRGRKKLLYIFKQPFMRPVQTTQEEDGCSCRFPEEEEGGCELRVKFSRSADAPAYQQGQNQLYNELNLGRREEYDVLDKRRGRDPEMGGKPRRKNPQEGLYNELQKDKMAEAYSEIGMKGERRRGKGHDGLYQGLSTATKDTYDALHMQALPPR

SEQ ID NO: 7978 - protein, 463 aa, Artificial Sequence
  source: /note="Description of Artificial Sequence: Synthetic Chimeric Antigen Receptor"
VQLQESGPDLVKPSQSLSLTCTVTGYSITSGYSWHWIRQFPGNKLEWMGYIHYSGDTDYNPSLKSRFSITRDTSKNQFFLQLNSVTTEDTATYYCATPGGFVYWGQGTLVTVSAGGGGSGGGGSGGGGSDVVMTQTPLTLSVTIGQPASISCKSSQSLLDSDGKTYLHWLLQRPGQSPKRLIFLVSKLDSGVPDRFTGSGSGTDFTLKISRVEAEDLGVYYCWQGTHFPQTFGGGTKLEIKAAAIEVMYPPPYLDNEKSNGTIIHVKGKHLCPSPLFPGPSKPFWVLVVVGGVLACYSLLVTVAFIIFWVRSKRSRLLHSDYMNMTPRRPGPTRKHYQPYAPPRDFAAYRSRVKFSRSADAPAYQQGQNQLYNELNLGRREEYDVLDKRRGRDPEMGGKPRRKNPQEGLYNELQKDKMAEAYSEIGMKGERRRGKGHDGLYQGLSTATKDTYDALHMQALPPR

SEQ ID NO: 7979 - protein, 486 aa, Artificial Sequence
  source: /note="Description of Artificial Sequence: Synthetic Chimeric Antigen Receptor"
MALPVTALLLPLALLLHAARPEVQLVESGGGLVKPGGSLRLSCAASGFTFSRYGMSWVRQAPGKRLEWVSTISGGGTYIYYPDSVKGRFTISRDNAKNTLYLQMNSLRAEDTAVYYCTRDNYGRNYDYGMDYWGQGTLVTVSSGGGGSGGGGSGGGGSEIVLTQSPATLSLSPGERATLTCSATSSVSYIHWYQQRPGQSPRLLIYSTSNLASGIPARFSGSGSGSDYTLTISSLEPEDFAVYYCQQRSSSPFTFGSGTKVEIKTTTPAPRPPTPAPTIASQPLSLRPEACRPAAGGAVHTRGLDFACDIYIWAPLAGTCGVLLLSLVITLYCRSKRSRLLHSDYMNMTPRRPGPTRKHYQPYAPPRDFAAYRSRVKFSRSADAPAYKQGQNQLYNELNLGRREEYDVLDKRRGRDPEMGGKPRRKNPQEGLYNELQKDKMAEAYSEIGMKGERRRGKGHDGLYQGLSTATKDTYDALHMQALPPR

SEQ ID NO: 7980 - protein, 487 aa, Artificial Sequence
  source: /note="Description of Artificial Sequence: Synthetic Chimeric Antigen Receptor"
MALPVTALLLPLALLLHAARPEVQLVESGGGLVKPGGSLRLSCAASGFTFSRYGMSWVRQAPGKRLEWVSTISGGGTYIYYPDSVKGRFTISRDNAKNTLYLQMNSLRAEDTAVYYCTRDNYGRNYDYGMDYWGQGTLVTVSSGGGGSGGGGSGGGGSEIVLTQSPATLSLSPGERATLTCSATSSVSYIHWYQQRPGQSPRLLIYSTSNLASGIPARFSGSGSGSDYTLTISSLEPEDFAVYYCQQRSSSPFTFGSGTKVEIKTTTPAPRPPTPAPTIASQPLSLRPEACRPAAGGAVHTRGLDFACDIYIWAPLAGTCGVLLLSLVITLYCKRGRKKLLYIFKQPFMRPVQTTQEEDGCSCRFPEEEEGGCELRVKFSRSADAPAYKQGQNQLYNELNLGRREEYDVLDKRRGRDPEMGGKPRRKNPQEGLYNELQKDKMAEAYSEIGMKGERRRGKGHDGLYQGLSTATKDTYDALHMQALPPR

SEQ ID NO: 7981 - protein, 528 aa, Artificial Sequence
  source: /note="Description of Artificial Sequence: Synthetic Chimeric Antigen Receptor"
MALPVTALLLPLALLLHAARPEVQLVESGGGLVKPGGSLRLSCAASGFTFSRYGMSWVRQAPGKRLEWVSTISGGGTYIYYPDSVKGRFTISRDNAKNTLYLQMNSLRAEDTAVYYCTRDNYGRNYDYGMDYWGQGTLVTVSSGGGGSGGGGSGGGGSEIVLTQSPATLSLSPGERATLTCSATSSVSYIHWYQQRPGQSPRLLIYSTSNLASGIPARFSGSGSGSDYTLTISSLEPEDFAVYYCQQRSSSPFTFGSGTKVEIKTTTPAPRPPTPAPTIASQPLSLRPEACRPAAGGAVHTRGLDFACDIYIWAPLAGTCGVLLLSLVITLYCRSKRSRLLHSDYMNMTPRRPGPTRKHYQPYAPPRDFAAYRSKRGRKKLLYIFKQPFMRPVQTTQEEDGCSCRFPEEEEGGCELRVKFSRSADAPAYKQGQNQLYNELNLGRREEYDVLDKRRGRDPEMGGKPRRKNPQEGLYNELQKDKMAEAYSEIGMKGERRRGKGHDGLYQGLSTATKDTYDALHMQALPPR

SEQ ID NO: 7982 - protein, 513 aa, Artificial Sequence
  source: /note="Description of Artificial Sequence: Synthetic Chimeric Antigen Receptor"
EVQLVESGGGLVKPGGSLRLSCAASGFTFSGYAMSWVRQAPGKGLEWVSTISSGGTYIYYPDSVKGRFTISRDNAKNSLYLQMNSLRAEDTAVYYCARLGGDNYYEYFDVWGKGTTVTVSSGGGGSGGGGSGGGGSDIVLTQSPASLAVSPGQRATITCRASKSVSTSGYSYMHWYQQKPGQPPKLLIYLASNLESGVPARFSGSGSGTDFTLTINPVEANDTANYYCQHSRELPFTFGGGTKVEIKRTTTTPAPRPPTPAPTIASQPLSLRPEACRPAAGGAVHTRGLDFACDIYIWAPLAGTCGVLLLSLVITLYCRSKRSRLLHSDYMNMTPRRPGPTRKHYQPYAPPRDFAAYRSKRGRKKLLYIFKQPFMRPVQTTQEEDGCSCRFPEEEEGGCELRVKFSRSADAPAYKQGQNQLYNELNLGRREEYDVLDKRRGRDPEMGGKPRRKNPQEGLYNELQKDKMAEAYSEIGMKGERRRGKGHDGLYQGLSTATKDTYDALHMQALPPR

SEQ ID NO: 7983 - protein, 451 aa, Artificial Sequence
  source: /note="Description of Artificial Sequence: Synthetic Chimeric Antigen Receptor"
MALPVTALLLPLALLLHAARPEVQLVESGGGLVKPGGSLRLSCAASGFTFSGYAMSWVRQAPGKGLEWVSTISSGGTYIYYPDSVKGRFTISRDNAKNSLYLQMNSLRAEDTAVYYCARLGGDNYYEYFDVWGKGTTVTVSSGGGGSGGGGSGGGGSDIVLTQSPASLAVSPGQRATITCRASKSVSTSGYSYMHWYQQKPGQPPKLLIYLASNLESGVPARFSGSGSGTDFTLTINPVEANDTANYYCQHSRELPFTFGGGTKVEIKRTTTTPAPRPPTPAPTIASQPLSLRPEACRPAAGGAVHTRGLDFACDIYIWAPLAGTCGVLLLSLVITLYCRVKFSRSADAPAYKQGQNQLYNELNLGRREEYDVLDKRRGRDPEMGGKPRRKNPQEGLYNELQKDKMAEAYSEIGMKGERRRGKGHDGLYQGLSTATKDTYDALHMQALPPR

SEQ ID NO: 7984 - protein, 492 aa, Artificial Sequence
  source: /note="Description of Artificial Sequence: Synthetic Chimeric Antigen Receptor"
MALPVTALLLPLALLLHAARPEVQLVESGGGLVKPGGSLRLSCAASGFTFSGYAMSWVRQAPGKGLEWVSTISSGGTYIYYPDSVKGRFTISRDNAKNSLYLQMNSLRAEDTAVYYCARLGGDNYYEYFDVWGKGTTVTVSSGGGGSGGGGSGGGGSDIVLTQSPASLAVSPGQRATITCRASKSVSTSGYSYMHWYQQKPGQPPKLLIYLASNLESGVPARFSGSGSGTDFTLTINPVEANDTANYYCQHSRELPFTFGGGTKVEIKRTTTTPAPRPPTPAPTIASQPLSLRPEACRPAAGGAVHTRGLDFACDIYIWAPLAGTCGVLLLSLVITLYCRSKRSRLLHSDYMNMTPRRPGPTRKHYQPYAPPRDFAAYRSRVKFSRSADAPAYKQGQNQLYNELNLGRREEYDVLDKRRGRDPEMGGKPRRKNPQEGLYNELQKDKMAEAYSEIGMKGERRRGKGHDGLYQGLSTATKDTYDALHMQALPPR

SEQ ID NO: 7985 - protein, 493 aa, Artificial Sequence
  source: /note="Description of Artificial Sequence: Synthetic Chimeric Antigen Receptor"
MALPVTALLLPLALLLHAARPEVQLVESGGGLVKPGGSLRLSCAASGFTFSGYAMSWVRQAPGKGLEWVSTISSGGTYIYYPDSVKGRFTISRDNAKNSLYLQMNSLRAEDTAVYYCARLGGDNYYEYFDVWGKGTTVTVSSGGGGSGGGGSGGGGSDIVLTQSPASLAVSPGQRATITCRASKSVSTSGYSYMHWYQQKPGQPPKLLIYLASNLESGVPARFSGSGSGTDFTLTINPVEANDTANYYCQHSRELPFTFGGGTKVEIKRTTTTPAPRPPTPAPTIASQPLSLRPEACRPAAGGAVHTRGLDFACDIYIWAPLAGTCGVLLLSLVITLYCKRGRKKLLYIFKQPFMRPVQTTQEEDGCSCRFPEEEEGGCELRVKFSRSADAPAYKQGQNQLYNELNLGRREEYDVLDKRRGRDPEMGGKPRRKNPQEGLYNELQKDKMAEAYSEIGMKGERRRGKGHDGLYQGLSTATKDTYDALHMQALPPR

SEQ ID NO: 7986 - protein, 488 aa, Artificial Sequence
  source: /note="Description of Artificial Sequence: Synthetic Chimeric Antigen Receptor"
MALPVTALLLPLALLLHAARPEVQLVESGGGLVKPGGSLRLSCAASGFTFSGYAMSWVRQAPGKGLEWVSTISSGGTYIYYPDSVKGRFTISRDNAKNSLYLQMNSLRAEDTAVYYCARLGGDNYYEYFDVWGKGTTVTVSSGGGGSGGGGSGGGGSDIVLTQSPASLAVSPGQRATITCRASKSVSTSGYSYMHWYQQKPGQPPKLLIYLASNLESGVPARFSGSGSGTDFTLTINPVEANDTANYYCQHSRELPFTFGGGTKVEIKRTTTTPAPRPPTPAPTIASQPLSLRPEACRPAAGGAVHTRGLDFACDIYIWAPLAGTCGVLLLSLVITLYCRRDQRLPPDAHKPPGGGSFRTPIQEEQADAHSTLAKIRVKFSRSADAPAYKQGQNQLYNELNLGRREEYDVLDKRRGRDPEMGGKPRRKNPQEGLYNELQKDKMAEAYSEIGMKGERRRGKGHDGLYQGLSTATKDTYDALHMQALPPR

SEQ ID NO: 7987 - protein, 529 aa, Artificial Sequence
  source: /note="Description of Artificial Sequence: Synthetic Chimeric Antigen Receptor"
MALPVTALLLPLALLLHAARPEVQLVESGGGLVKPGGSLRLSCAASGFTFSGYAMSWVRQAPGKGLEWVSTISSGGTYIYYPDSVKGRFTISRDNAKNSLYLQMNSLRAEDTAVYYCARLGGDNYYEYFDVWGKGTTVTVSSGGGGSGGGGSGGGGSDIVLTQSPASLAVSPGQRATITCRASKSVSTSGYSYMHWYQQKPGQPPKLLIYLASNLESGVPARFSGSGSGTDFTLTINPVEANDTANYYCQHSRELPFTFGGGTKVEIKRTTTTPAPRPPTPAPTIASQPLSLRPEACRPAAGGAVHTRGLDFACDIYIWAPLAGTCGVLLLSLVITLYCRSKRSRLLHSDYMNMTPRRPGPTRKHYQPYAPPRDFAAYRSRRDQRLPPDAHKPPGGGSFRTPIQEEQADAHSTLAKIRVKFSRSADAPAYKQGQNQLYNELNLGRREEYDVLDKRRGRDPEMGGKPRRKNPQEGLYNELQKDKMAEAYSEIGMKGERRRGKGHDGLYQGLSTATKDTYDALHMQALPPR

SEQ ID NO: 7988 - protein, 482 aa, Artificial Sequence
  source: /note="Description of Artificial Sequence: Synthetic Chimeric Antigen Receptor"
MALPVTALLLPLALLLHAARPEVQLVESGGGLVKPGGSLRLSCAASGFTFSRYGMSWVRQAPGKRLEWVSTISGGGTYIYYPDSVKGRFTISRDNAKNTLYLQMNSLRAEDTAVYYCTRDNYGRNYDYGMDYWGQGTLVTVSSGGGGSGGGGSGGGGSEIVLTQSPATLSLSPGERATLTCSATSSVSYIHWYQQRPGQSPRLLIYSTSNLASGIPARFSGSGSGSDYTLTISSLEPEDFAVYYCQQRSSSPFTFGSGTKVEIKTTTPAPRPPTPAPTIASQPLSLRPEACRPAAGGAVHTRGLDFACDIYIWAPLAGTCGVLLLSLVITLYCRRDQRLPPDAHKPPGGGSFRTPIQEEQADAHSTLAKIRVKFSRSADAPAYKQGQNQLYNELNLGRREEYDVLDKRRGRDPEMGGKPRRKNPQEGLYNELQKDKMAEAYSEIGMKGERRRGKGHDGLYQGLSTATKDTYDALHMQALPPR

SEQ ID NO: 7989 - protein, 523 aa, Artificial Sequence
  source: /note="Description of Artificial Sequence: Synthetic Chimeric Antigen Receptor"
MALPVTALLLPLALLLHAARPEVQLVESGGGLVKPGGSLRLSCAASGFTFSRYGMSWVRQAPGKRLEWVSTISGGGTYIYYPDSVKGRFTISRDNAKNTLYLQMNSLRAEDTAVYYCTRDNYGRNYDYGMDYWGQGTLVTVSSGGGGSGGGGSGGGGSEIVLTQSPATLSLSPGERATLTCSATSSVSYIHWYQQRPGQSPRLLIYSTSNLASGIPARFSGSGSGSDYTLTISSLEPEDFAVYYCQQRSSSPFTFGSGTKVEIKTTTPAPRPPTPAPTIASQPLSLRPEACRPAAGGAVHTRGLDFACDIYIWAPLAGTCGVLLLSLVITLYCRSKRSRLLHSDYMNMTPRRPGPTRKHYQPYAPPRDFAAYRSRRDQRLPPDAHKPPGGGSFRTPIQEEQADAHSTLAKIRVKFSRSADAPAYKQGQNQLYNELNLGRREEYDVLDKRRGRDPEMGGKPRRKNPQEGLYNELQKDKMAEAYSEIGMKGERRRGKGHDGLYQGLSTATKDTYDALHMQALPPR

SEQ ID NO: 7990 - protein, 1397 aa, Artificial Sequence
  source: /note="Description of Artificial Sequence: Synthetic Chimeric Antigen Receptor"
MEEISAAAVKVVPGPERPSPFSQLVYTSNDSYIVHSGDLRKIHKAASRGQVRKLEKMTKRKKTINLNIQDAQKRTALHWACVNGHEEVVTFLVDRKCQLDVLDGEHRTPLMKALQCHQEACANILIDSGADINLVDVYGNTALHYAVYSEILSVVAKLLSHGAVIEVHNKASLTPLLLSITKRSEQIVEFLLIKNANANAVNKYKCTALMLAVCHGSSEIVGMLLQQNVDVFAADICGVTAEHYAVTCGFHHIHEQIMEYIRKLSKNHQNTNPEGTSAGTPDEAAPLAERTPDTAESLVEKTPDEAAPLVERTPDTAESLVEKTPDEAASLVEGTSDKIQCLEKATSGKFEQSAEETPREITSPAKETSEKFTWPAKGRPRKIAWEKKEDTPREIMSPAKETSEKFTWAAKGRPRKIAWEKKETPVKTGCVARVTSNKTKVLEKGRSKMIACPTKESSTKASANDQRFPSESKQEEDEEYSCDSRSLFESSAKIQVCIPESIYQKVMEINREVEEPPKKPSAFKPAIEMQNSVPNKAFELKNEQTLRADPMFPPESKQKDYEENSWDSESLCETVSQKDVCLPKATHQKEIDKINGKLEESPNKDGLLKATCGMKVSIPTKALELKDMQTFKAEPPGKPSAFEPATEMQKSVPNKALELKNEQTLRADEILPSESKQKDYEENSWDTESLCETVSQKDVCLPKAAHQKEIDKINGKLEGSPVKDGLLKANCGMKVSIPTKALELMDMQTFKAEPPEKPSAFEPAIEMQKSVPNKALELKNEQTLRADEILPSESKQKDYEESSWDSESLCETVSQKDVCLPKATHQKEIDKINGKLEESPDNDGFLKAPCRMKVSIPTKALELMDMQTFKAEPPEKPSAFEPAIEMQKSVPNKALELKNEQTLRADQMFPSESKQKKVEENSWDSESLRETVSQKDVCVPKATHQKEMDKISGKLEDSTSLSKILDTVHSCERARELQKDHCEQRTGKMEQMKKKFCVLKKKLSEAKEIKSQLENQKVKWEQELCSVRLTLNQEEEKRRNADILNEKIREELGRIEEQHRKELEVKQQLEQALRIQDIELKSVESNLNQVSHTHENENYLLHENCMLKKEIAMLKLEIATLKHQYQEKENKYFEDIKILKEKNAELQMTLKLKEESLTKRASQYSGQLKVLIAENTMLTSKLKEKQDKEILEAEIESHHPRLASAVQDHDQIVTSRKSQEPAFHIAGDACLQRKMNVDVSSTIYNNEVLHQPLSEAQRKSKSLKINLNYAGDALRENTLVSEHAQRDQRETQCQMKEAEHMYQNEQDNVNKHTEQQESLDQKLFQLQSKNMWLQQQLVHAHKKADNKSKITIDIHFLERKMQHHLLKEKNEEIFNYNNHLKNRIYQYEKEKAETENS

SEQ ID NO: 7991 - protein, 394 aa, Artificial Sequence
  source: /note="Description of Artificial Sequence: Synthetic Chimeric Antigen Receptor"
MALPVTALLLPLALLLHAARPPGWFLDSPDRPWNPPTFSPALLVVTEGDNATFTCSFSNTSESFVLNWYRMSPSNQTDKLAAFPEDRSQPGQDCRFRVTQLPNGRDFHMSVVRARRNDSGTYLCGAISLAPKAQIKESLRAELRVTERRAEVPTAHPSPSPRPAGQFQTLVTTTPAPRPPTPAPTIASQPLSLRPEACRPAAGGAVHTRGLDFACDIYIWAPLAGTCGVLLLSLVITLYCKRGRKKLLYIFKQPFMRPVQTTQEEDGCSCRFPEEEEGGCELRVKFSRSADAPAYKQGQNQLYNELNLGRREEYDVLDKRRGRDPEMGGKPRRKNPQEGLYNELQKDKMAEAYSEIGMKGERRRGKGHDGLYQGLSTATKDTYDALHMQALPPR

SEQ ID NO: 7992 - protein, 527 aa, Artificial Sequence
  source: /note="Description of Artificial Sequence: Synthetic Chimeric Antigen Receptor"
VQLQESGPDLVKPSQSLSLTCTVTGYSITSGYSWHWIRQFPGNKLEWMGYIHYSGDTDYNPSLKSRFSITRDTSKNQFFLQLNSVTTEDTATYYCATPGGFVYWGQGTLVTVSAGGGGSGGGGSGGGGSDVVMTQTPLTLSVTIGQPASISCKSSQSLLDSDGKTYLHWLLQRPGQSPKRLIFLVSKLDSGVPDRFTGSGSGTDFTLKISRVEAEDLGVYYCWQGTHFPQTFGGGTKLEIKAAAFVPVFLPAKPTTTPAPRPPTPAPTIASQPLSLRPEACRPAAGGAVHTRGLDFACDIYIWAPLAGTCGVLLLSLVITLYCNHRNRSKRSRLLHSDYMNMTPRRPGPTRKHYQPYAPPRDFAAYRSRFSVVKRGRKKLLYIFKQPFMRPVQTTQEEDGCSCRFPEEEEGGCELRVKFSRSADAPAYQQGQNQLYNELNLGRREEYDVLDKRRGRDPEMGGKPRRKNPQEGLYNELQKDKMAEAYSEIGMKGERRRGKGHDGLYQGLSTATKDTYDALHMQALPPR

SEQ ID NO: 7993 - protein, 486 aa, Artificial Sequence
  source: /note="Description of Artificial Sequence: Synthetic Chimeric Antigen Receptor"
VQLQESGPDLVKPSQSLSLTCTVTGYSITSGYSWHWIRQFPGNKLEWMGYIHYSGDTDYNPSLKSRFSITRDTSKNQFFLQLNSVTTEDTATYYCATPGGFVYWGQGTLVTVSAGGGGSGGGGSGGGGSDVVMTQTPLTLSVTIGQPASISCKSSQSLLDSDGKTYLHWLLQRPGQSPKRLIFLVSKLDSGVPDRFTGSGSGTDFTLKISRVEAEDLGVYYCWQGTHFPQTFGGGTKLEIKAAAFVPVFLPAKPTTTPAPRPPTPAPTIASQPLSLRPEACRPAAGGAVHTRGLDFACDIYIWAPLAGTCGVLLLSLVITLYCNHRNRFSVVKRGRKKLLYIFKQPFMRPVQTTQEEDGCSCRFPEEEEGGCELRVKFSRSADAPAYQQGQNQLYNELNLGRREEYDVLDKRRGRDPEMGGKPRRKNPQEGLYNELQKDKMAEAYSEIGMKGERRRGKGHDGLYQGLSTATKDTYDALHMQALPPR

SEQ ID NO: 7994 - protein, 453 aa, Artificial Sequence
  source: /note="Description of Artificial Sequence: Synthetic Chimeric Antigen Receptor"
MALPVTALLLPLALLLHAARPEVQLLESGGGLVQPGGSLRLSCAASGFTFSSYAMNWVRQAPGKGLEWVSAISDSGGSTYYADSVKGRFTISRDNSKNTLYLQMNSLRAEDTAVYYCARYWPMDIWGQGTLVTVSSGGGGSGGGGSGGGGSEIVLTQSPGTLSLSPGERATLSCRASQSVSSSYLAWYQQKPGQAPRLLMYDASIRATGIPDRFSGSGSGTDFTLTISRLEPEDFAVYYCQQYGSWPLTFGQGTKVEIKGLAVSTISSFFPPGYQIYIWAPLAGTCGVLLLSLVITLYCKRGRKKLLYIFKQPFMRPVQTTQEEDGCSCRFPEEEEGGCELRVKFSRSADAPAYQQGQNQLYNELNLGRREEYDVLDKRRGRDPEMGGKPRRKNPQEGLYNELQKDKMAEAYSEIGMKGERRRGKGHDGLYQGLSTATKDTYDALHMQALPPR

SEQ ID NO: 7995 - protein, 463 aa, Artificial Sequence; identical to SEQ ID NO: 7978
  source: /note="Description of Artificial Sequence: Synthetic Chimeric Antigen Receptor"

SEQ ID NO: 7996 - protein, 527 aa, Artificial Sequence; identical to SEQ ID NO: 7992
  source: /note="Description of Artificial Sequence: Synthetic Chimeric Antigen Receptor"

SEQ ID NO: 7997 - protein, 486 aa, Artificial Sequence; identical to SEQ ID NO: 7993
  source: /note="Description of Artificial Sequence: Synthetic Chimeric Antigen Receptor"

SEQ ID NO: 7998 - protein, 489 aa, Artificial Sequence
  source: /note="Description of Artificial Sequence: Synthetic Chimeric Antigen Receptor"
MALPVTALLLPLALLLHAARPAIRMTQSPSSLSASVGDRVTITCQASQDISNYLNWYQQKPGKAPKLLIYDASNLETGVPSRFSGSGSGTDFTFTISSLQPEDIATYYCQQYDNLPLTFGGGTKVEIKRGGGGSGGGGSGGGGSEVQLVESGGGLVKPGGSLRLSCAASGFTFSDYYMSWIRQAPGKGLEWVSYISDSTNTIYYADSVKGRFTVSRDNPKNSLYLQMISLRAEDTAVYYCARAVGAGEGFDHWGQGTLVTVSSAAATTTPAPRPPTPAPTIASQPLSLRPEACRPAAGGAVHTRGLDFACDIYIWAPLAGTCGVLLLSLVITLYCKRGRKKLLYIFKQPFMRPVQTTQEEDGCSCRFPEEEEGGCELRVKFSRSADAPAYQQGQNQLYNELNLGRREEYDVLDKRRGRDPEMGGKPRRKNPQEGLYNELQKDKMAEAYSEIGMKGERRRGKGHDGLYQGLSTATKDTYDALHMQALPPR

SEQ ID NO: 7999 - protein, 482 aa, Artificial Sequence
  source: /note="Description of Artificial Sequence: Synthetic Chimeric Antigen Receptor"
MALPVTALLLPLALLLHAARPEVQLLESGGGLVQPGGSLRLSCAASGFTFSSYAMNWVRQAPGKGLEWVSAISDSGGSTYYADSVKGRFTISRDNSKNTLYLQMNSLRAEDTAVYYCARYWPMDIWGQGTLVTVSSGGGGSGGGGSGGGGSEIVLTQSPGTLSLSPGERATLSCRASQSVSSSYLAWYQQKPGQAPRLLMYDASIRATGIPDRFSGSGSGTDFTLTISRLEPEDFAVYYCQQYGSWPLTFGQGTKVEIKTTTPAPRPPTPAPTIASQPLSLRPEACRPAAGGAVHTRGLDFACDIYIWAPLAGTCGVLLLSLVITLYCKRGRKKLLYIFKQPFMRPVQTTQEEDGCSCRFPEEEEGGCELRVKFSRSADAPAYQQGQNQLYNELNLGRREEYDVLDKRRGRDPEMGGKPRRKNPQEGLYNELQKDKMAEAYSEIGMKGERRRGKGHDGLYQGLSTATKDTYDALHMQALPPR

SEQ ID NO: 8000 - protein, 668 aa, Artificial Sequence
  source: /note="Description of Artificial Sequence: Synthetic Chimeric Antigen Receptor"
MALPVTALLLPLALLLHAARPEVQLLESGGGLVQPGGSLRLSCAASGFTFSSYAMNWVRQAPGKGLEWVSAISDSGGSTYYADSVKGRFTISRDNSKNTLYLQMNSLRAEDTAVYYCARYWPMDIWGQGTLVTVSSGGGGSGGGGSGGGGSEIVLTQSPGTLSLSPGERATLSCRASQSVSSSYLAWYQQKPGQAPRLLMYDASIRATGIPDRFSGSGSGTDFTLTISRLEPEDFAVYYCQQYGSWPLTFGQGTKVEIKEPKSPDKTHTCPPCPAPPVAGPSVFLFPPKPKDTLMIARTPEVTCVVVDVSHEDPEVKFNWYVDGVEVHNAKTKPREEQYNSTYRVVSVLTVLHQDWLNGKEYKCKVSNKALPAPIEKTISKAKGQPREPQVYTLPPSRDELTKNQVSLTCLVKGFYPSDIAVEWESNGQPENNYKTTPPVLDSDGSFFLYSKLTVDKSRWQQGNVFSCSVMHEALHNHYTQKSLSLSPGKIYIWAPLAGTCGVLLLSLVITLYCKRGRKKLLYIFKQPFMRPVQTTQEEDGCSCRFPEEEEGGCELRVKFSRSADAPAYQQGQNQLYNELNLGRREEYDVLDKRRGRDPEMGGKPRRKNPQEGLYNELQKDKMAEAYSEIGMKGERRRGKGHDGLYQGLSTATKDTYDALHMQALPPR

SEQ ID NO: 8001 - protein, 453 aa, Artificial Sequence
  source: /note="Description of Artificial Sequence: Synthetic Chimeric Antigen Receptor"
MALPVTALLLPLALLLHAARPEVQLLESGGGLVQPGGSLRLSCAASGFTFSSYAMNWVRQAPGKGLEWVSAILSSGGSTYYADSVKGRFTISRDNSKNTLYLQMNSLRAEDTAVYYCARYWPMDIWGQGTLVTVSSGGGGSGGGGSGGGGSEIVLTQSPGTLSLSPGERATLSCRGGQSVSSSYLAWYQQKPGQAPRLLMYDASIRATGIPDRFSGSGSGTDFTLTISRLEPEDFAVYYCQQYQSWPLTFGQGTKVEIKGLAVSTISSFFPPGYQIYIWAPLAGTCGVLLLSLVITLYCKRGRKKLLYIFKQPFMRPVQTTQEEDGCSCRFPEEEEGGCELRVKFSRSADAPAYQQGQNQLYNELNLGRREEYDVLDKRRGRDPEMGGKPRRKNPQEGLYNELQKDKMAEAYSEIGMKGERRRGKGHDGLYQGLSTATKDTYDALHMQALPPR

SEQ ID NO: 8002 - protein, 482 aa, Artificial Sequence
  source: /note="Description of Artificial Sequence: Synthetic Chimeric Antigen Receptor"
MALPVTALLLPLALLLHAARPEVQLLESGGGLVQPGGSLRLSCAASGFTFSSYAMNWVRQAPGKGLEWVSAILSSGGSTYYADSVKGRFTISRDNSKNTLYLQMNSLRAEDTAVYYCARYWPMDIWGQGTLVTVSSGGGGSGGGGSGGGGSEIVLTQSPGTLSLSPGERATLSCRGGQSVSSSYLAWYQQKPGQAPRLLMYDASIRATGIPDRFSGSGSGTDFTLTISRLEPEDFAVYYCQQYQSWPLTFGQGTKVEIKTTTPAPRPPTPAPTIASQPLSLRPEACRPAAGGAVHTRGLDFACDIYIWAPLAGTCGVLLLSLVITLYCKRGRKKLLYIFKQPFMRPVQTTQEEDGCSCRFPEEEEGGCELRVKFSRSADAPAYQQGQNQLYNELNLGRREEYDVLDKRRGRDPEMGGKPRRKNPQEGLYNELQKDKMAEAYSEIGMKGERRRGKGHDGLYQGLSTATKDTYDALHMQALPPR

SEQ ID NO: 8003 - protein, 519 aa, Artificial Sequence
  source: /note="Description of Artificial Sequence: Synthetic Chimeric Antigen Receptor"
MALPVTALLLPLALLLHAARPEVQLLESGGGLVQPGGSLRLSCAASGFTFSSYAMNWVRQAPGKGLEWVSAILSSGGSTYYADSVKGRFTISRDNSKNTLYLQMNSLRAEDTAVYYCARYWPMDIWGQGTLVTVSSGGGGSGGGGSGGGGSEIVLTQSPGTLSLSPGERATLSCRGGQSVSSSYLAWYQQKPGQAPRLLMYDASIRATGIPDRFSGSGSGTDFTLTISRLEPEDFAVYYCQQYQSWPLTFGQGTKVEIKGSGGGGSCPYSNPSLCSGGGGSCPYSNPSLCSGGGGSTTTPAPRPPTPAPTIASQPLSLRPEACRPAAGGAVHTRGLDFACDIYIWAPLAGTCGVLLLSLVITLYCKRGRKKLLYIFKQPFMRPVQTTQEEDGCSCRFPEEEEGGCELRVKFSRSADAPAYQQGQNQLYNELNLGRREEYDVLDKRRGRDPEMGGKPRRKNPQEGLYNELQKDKMAEAYSEIGMKGERRRGKGHDGLYQGLSTATKDTYDALHMQALPPR

SEQ ID NO: 8004 - protein, 519 aa, Artificial Sequence; identical to SEQ ID NO: 8003
  source: /note="Description of Artificial Sequence: Synthetic Chimeric Antigen Receptor"

SEQ ID NO: 8005 - protein, 453 aa, Artificial Sequence
  source: /note="Description of Artificial Sequence: Synthetic Chimeric Antigen Receptor"
MALPVTALLLPLALLLHAARPEVQLLESGGGLVQPGGSLRLSCAASGFTFSSYAMNWVRQAPGKGLEWVSAISDFGGSTYYADSVKGRFTISRDNSKNTLYLQMNSLRAEDTAVYYCARYWPMDIWGQGTLVTVSSGGGGSGGGGSGGGGSEIVLTQSPGTLSLSPGERATLSCRASQSVSDIYLAWYQQKPGQAPRLLMYDASIRATGIPDRFSGSGSGTDFTLTISRLEPEDFAVYYCQQYQTWPLTFGQGTKVEIKGLAVSTISSFFPPGYQIYIWAPLAGTCGVLLLSLVITLYCKRGRKKLLYIFKQPFMRPVQTTQEEDGCSCRFPEEEEGGCELRVKFSRSADAPAYQQGQNQLYNELNLGRREEYDVLDKRRGRDPEMGGKPRRKNPQEGLYNELQKDKMAEAYSEIGMKGERRRGKGHDGLYQGLSTATKDTYDALHMQALPPR

SEQ ID NO: 8006 - protein, 482 aa, Artificial Sequence
  source: /note="Description of Artificial Sequence: Synthetic Chimeric Antigen Receptor"
MALPVTALLLPLALLLHAARPEVQLLESGGGLVQPGGSLRLSCAASGFTFSSYAMNWVRQAPGKGLEWVSAISDFGGSTYYADSVKGRFTISRDNSKNTLYLQMNSLRAEDTAVYYCARYWPMDIWGQGTLVTVSSGGGGSGGGGSGGGGSEIVLTQSPGTLSLSPGERATLSCRASQSVSDIYLAWYQQKPGQAPRLLMYDASIRATGIPDRFSGSGSGTDFTLTISRLEPEDFAVYYCQQYQTWPLTFGQGTKVEIKTTTPAPRPPTPAPTIASQPLSLRPEACRPAAGGAVHTRGLDFACDIYIWAPLAGTCGVLLLSLVITLYCKRGRKKLLYIFKQPFMRPVQTTQEEDGCSCRFPEEEEGGCELRVKFSRSADAPAYQQGQNQLYNELNLGRREEYDVLDKRRGRDPEMGGKPRRKNPQEGLYNELQKDKMAEAYSEIGMKGERRRGKGHDGLYQGLSTATKDTYDALHMQALPPR

SEQ ID NO: 8007 - protein, 668 aa, Artificial Sequence
  source: /note="Description of Artificial Sequence: Synthetic Chimeric Antigen Receptor"
MALPVTALLLPLALLLHAARPEVQLLESGGGLVQPGGSLRLSCAASGFTFSSYAMNWVRQAPGKGLEWVSAISDFGGSTYYADSVKGRFTISRDNSKNTLYLQMNSLRAEDTAVYYCARYWPMDIWGQGTLVTVSSGGGGSGGGGSGGGGSEIVLTQSPGTLSLSPGERATLSCRASQSVSDIYLAWYQQKPGQAPRLLMYDASIRATGIPDRFSGSGSGTDFTLTISRLEPEDFAVYYCQQYQTWPLTFGQGTKVEIKEPKSPDKTHTCPPCPAPPVAGPSVFLFPPKPKDTLMIARTPEVTCVVVDVSHEDPEVKFNWYVDGVEVHNAKTKPREEQYNSTYRVVSVLTVLHQDWLNGKEYKCKVSNKALPAPIEKTISKAKGQPREPQVYTLPPSRDELTKNQVSLTCLVKGFYPSDIAVEWESNGQPENNYKTTPPVLDSDGSFFLYSKLTVDKSRWQQGNVFSCSVMHEALHNHYTQKSLSLSPGKIYIWAPLAGTCGVLLLSLVITLYCKRGRKKLLYIFKQPFMRPVQTTQEEDGCSCRFPEEEEGGCELRVKFSRSADAPAYQQGQNQLYNELNLGRREEYDVLDKRRGRDPEMGGKPRRKNPQEGLYNELQKDKMAEAYSEIGMKGERRRGKGHDGLYQGLSTATKDTYDALHMQALPPR

SEQ ID NO: 8008 - protein, 453 aa, Artificial Sequence
  source: /note="Description of Artificial Sequence: Synthetic Chimeric Antigen Receptor"
MALPVTALLLPLALLLHAARPEVQLLESGGGLVQPGGSLRLSCAASGFTFGSYAMTWVRQAPGKGLEWVSAISGSGGNTFYADSVKGRFTISRDNSKNTLYLQMNSLRAEDTAVYYCARVSPIAAPMDYWGQGTLVTVSSGGGGSGGGGSGGGGSEIVLTQSPGTLSLSPGERATLSCRASQLGSFYLAWYQQKPGQAPRLLIYGASSRATGIPDRFSGSGSGTDFTLTISRLEPEDFAVYYCQHYNYPPSFTFGQGTKVEIKGLAVSTISSFFPPGYQIYIWAPLAGTCGVLLLSLVITLYCKRGRKKLLYIFKQPFMRPVQTTQEEDGCSCRFPEEEEGGCELRVKFSRSADAPAYQQGQNQLYNELNLGRREEYDVLDKRRGRDPEMGGKPRRKNPQEGLYNELQKDKMAEAYSEIGMKGERRRGKGHDGLYQGLSTATKDTYDALHMQA

SEQ ID NO: 8009 - protein, 486 aa, Artificial Sequence
  source: /note="Description of Artificial Sequence: Synthetic Chimeric Antigen Receptor"
MALPVTALLLPLALLLHAARPEVQLLESGGGLVQPGGSLRLSCAASGFTFGSYAMTWVRQAPGKGLEWVSAISGSGGNTFYADSVKGRFTISRDNSKNTLYLQMNSLRAEDTAVYYCARVSPIAAPMDYWGQGTLVTVSSGGGGSGGGGSGGGGSEIVLTQSPGTLSLSPGERATLSCRASQLGSFYLAWYQQKPGQAPRLLIYGASSRATGIPDRFSGSGSGTDFTLTISRLEPEDFAVYYCQHYNYPPSFTFGQGTKVEIKTTTPAPRPPTPAPTIASQPLSLRPEACRPAAGGAVHTRGLDFACDIYIWAPLAGTCGVLLLSLVITLYCKRGRKKLLYIFKQPFMRPVQTTQEEDGCSCRFPEEEEGGCELRVKFSRSADAPAYQQGQNQLYNELNLGRREEYDVLDKRRGRDPEMGGKPRRKNPQEGLYNELQKDKMAEAYSEIGMKGERRRGKGHDGLYQGLSTATKDTYDALHMQALPPR

SEQ ID NO: 8010 - protein, 672 aa, Artificial Sequence
  source: /note="Description of Artificial Sequence: Synthetic Chimeric Antigen Receptor"
MALPVTALLLPLALLLHAARPEVQLLESGGGLVQPGGSLRLSCAASGFTFGSYAMTWVRQAPGKGLEWVSAISGSGGNTFYADSVKGRFTISRDNSKNTLYLQMNSLRAEDTAVYYCARVSPIAAPMDYWGQGTLVTVSSGGGGSGGGGSGGGGSEIVLTQSPGTLSLSPGERATLSCRASQLGSFYLAWYQQKPGQAPRLLIYGASSRATGIPDRFSGSGSGTDFTLTISRLEPEDFAVYYCQHYNYPPSFTFGQGTKVEIKEPKSPDKTHTCPPCPAPPVAGPSVFLFPPKPKDTLMIARTPEVTCVVVDVSHEDPEVKFNWYVDGVEVHNAKTKPREEQYNSTYRVVSVLTVLHQDWLNGKEYKCKVSNKALPAPIEKTISKAKGQPREPQVYTLPPSRDELTKNQVSLTCLVKGFYPSDIAVEWESNGQPENNYKTTPPVLDSDGSFFLYSKLTVDKSRWQQGNVFSCSVMHEALHNHYTQKSLSLSPGKIYIWAPLAGTCGVLLLSLVITLYCKRGRKKLLYIFKQPFMRPVQTTQEEDGCSCRFPEEEEGGCELRVKFSRSADAPAYQQGQNQLYNELNLGRREEYDVLDKRRGRDPEMGGKPRRKNPQEGLYNELQKDKMAEAYSEIGMKGERRRGKGHDGLYQGLSTATKDTYDALHMQALPPR

SEQ ID NO: 8011 - protein, 453 aa, Artificial Sequence
  source: /note="Description of Artificial Sequence: Synthetic Chimeric Antigen Receptor"
MALPVTALLLPLALLLHAARPEVQLLESGGGLVQPGGSLRLSCAASGFTFGSYAMTWVRQAPGKGLEWVSAIDYSGGNTFYADSVKGRFTISRDNSKNTLYLQMNSLRAEDTAVYYCARVSPIASGMDYWGQGTLVTVSSGGGGSGGGGSGGGGSEIVLTQSPGTLSLSPGERATLSCRASQSVSSSYPSWYQQKPGQAPRLLIYGASSRATGIPDRFSGSGSGTDFTLTISRLEPEDFAVYYCQHYPYPPSFTFGQGTKVEIKGLAVSTISSFFPPGYQIYIWAPLAGTCGVLLLSLVITLYCKRGRKKLLYIFKQPFMRPVQTTQEEDGCSCRFPEEEEGGCELRVKFSRSADAPAYQQGQNQLYNELNLGRREEYDVLDKRRGRDPEMGGKPRRKNPQEGLYNELQKDKMAEAYSEIGMKGERRRGKGHDGLYQGLSTATKDTYDALHMQ

SEQ ID NO: 8012 - protein, 487 aa, Artificial Sequence
  source: /note="Description of Artificial Sequence: Synthetic Chimeric Antigen Receptor"
MALPVTALLLPLALLLHAARPEVQLLESGGGLVQPGGSLRLSCAASGFTFGSYAMTWVRQAPGKGLEWVSAIDYSGGNTFYADSVKGRFTISRDNSKNTLYLQMNSLRAEDTAVYYCARVSPIASGMDYWGQGTLVTVSSGGGGSGGGGSGGGGSEIVLTQSPGTLSLSPGERATLSCRASQSVSSSYPSWYQQKPGQAPRLLIYGASSRATGIPDRFSGSGSGTDFTLTISRLEPEDFAVYYCQHYPYPPSFTFGQGTKVEIKTTTPAPRPPTPAPTIASQPLSLRPEACRPAAGGAVHTRGLDFACDIYIWAPLAGTCGVLLLSLVITLYCKRGRKKLLYIFKQPFMRPVQTTQEEDGCSCRFPEEEEGGCELRVKFSRSADAPAYQQGQNQLYNELNLGRREEYDVLDKRRGRDPEMGGKPRRKNPQEGLYNELQKDKMAEAYSEIGMKGERRRGKGHDGLYQGLSTATKDTYDALHMQALPPR

SEQ ID NO: 8013 - protein, 673 aa, Artificial Sequence
  source: /note="Description of Artificial Sequence: Synthetic Chimeric Antigen Receptor"
MALPVTALLLPLALLLHAARPEVQLLESGGGLVQPGGSLRLSCAASGFTFGSYAMTWVRQAPGKGLEWVSAIDYSGGNTFYADSVKGRFTISRDNSKNTLYLQMNSLRAEDTAVYYCARVSPIASGMDYWGQGTLVTVSSGGGGSGGGGSGGGGSEIVLTQSPGTLSLSPGERATLSCRASQSVSSSYPSWYQQKPGQAPRLLIYGASSRATGIPDRFSGSGSGTDFTLTISRLEPEDFAVYYCQHYPYPPSFTFGQGTKVEIKEPKSPDKTHTCPPCPAPPVAGPSVFLFPPKPKDTLMIARTPEVTCVVVDVSHEDPEVKFNWYVDGVEVHNAKTKPREEQYNSTYRVVSVLTVLHQDWLNGKEYKCKVSNKALPAPIEKTISKAKGQPREPQVYTLPPSRDELTKNQVSLTCLVKGFYPSDIAVEWESNGQPENNYKTTPPVLDSDGSFFLYSKLTVDKSRWQQGNVFSCSVMHEALHNHYTQKSLSLSPGKIYIWAPLAGTCGVLLLSLVITLYCKRGRKKLLYIFKQPFMRPVQTTQEEDGCSCRFPEEEEGGCELRVKFSRSADAPAYQQGQNQLYNELNLGRREEYDVLDKRRGRDPEMGGKPRRKNPQEGLYNELQKDKMAEAYSEIGMKGERRRGKGHDGLYQGLSTATKDTYDALHMQALPPR

SEQ ID NO: 8014 - protein, 453 aa, Artificial Sequence
  source: /note="Description of Artificial Sequence: Synthetic Chimeric Antigen Receptor"
MALPVTALLLPLALLLHAARPEVQLLESGGGLVQPGGSLRLSCAASGFTFSSYPMSWVRQAPGKGLEWVSAIGGSGGSTYYADSVKGRFTISRDNSKNTLYLQMNSLRAEDTAVYYCARYWPMDSWGQGTLVTVSSGGGGSGGGGSGGGGSEIVLTQSPGTLSLSPGERATLSCRASQSVSSTYLAWYQQKPGQAPRLLIYDASSRAPGIPDRFSGSGSGTDFTLTISRLEPEDFAVYYCQQYSTSPLTFGQGTKVEIKGLAVSTISSFFPPGYQIYIWAPLAGTCGVLLLSLVITLYCKRGRKKLLYIFKQPFMRPVQTTQEEDGCSCRFPEEEEGGCELRVKFSRSADAPAYQQGQNQLYNELNLGRREEYDVLDKRRGRDPEMGGKPRRKNPQEGLYNELQKDKMAEAYSEIGMKGERRRGKGHDGLYQGLSTATKDTYDALHMQALPPR

SEQ ID NO: 8015 - protein, 482 aa, Artificial Sequence
  source: /note="Description of Artificial Sequence: Synthetic Chimeric Antigen Receptor"
MALPVTALLLPLALLLHAARPEVQLLESGGGLVQPGGSLRLSCAASGFTFSSYPMSWVRQAPGKGLEWVSAIGGSGGSTYYADSVKGRFTISRDNSKNTLYLQMNSLRAEDTAVYYCARYWPMDSWGQGTLVTVSSGGGGSGGGGSGGGGSEIVLTQSPGTLSLSPGERATLSCRASQSVSSTYLAWYQQKPGQAPRLLIYDASSRAPGIPDRFSGSGSGTDFTLTISRLEPEDFAVYYCQQYSTSPLTFGQGTKVEIKTTTPAPRPPTPAPTIASQPLSLRPEACRPAAGGAVHTRGLDFACDIYIWAPLAGTCGVLLLSLVITLYCKRGRKKLLYIFKQPFMRPVQTTQEEDGCSCRFPEEEEGGCELRVKFSRSADAPAYQQGQNQLYNELNLGRREEYDVLDKRRGRDPEMGGKPRRKNPQEGLYNELQKDKMAEAYSEIGMKGERRRGKGHDGLYQGLSTATKDTYDALHMQALPPR

SEQ ID NO: 8016 - protein, 482 aa, Artificial Sequence; identical to SEQ ID NO: 8015
  source: /note="Description of Artificial Sequence: Synthetic Chimeric Antigen Receptor"

SEQ ID NO: 8017 - protein, 453 aa, Artificial Sequence
  source: /note="Description of Artificial Sequence: Synthetic Chimeric Antigen Receptor"
MALPVTALLLPLALLLHAARPEVQLLESGGGLVQPGGSLRLSCAASGFTFSSYPMSWVRQAPGKGLEWVSAIGGSGGWSYYADSVKGRFTISRDNSKNTLYLQMNSLRAEDTAVYYCARYWPMDSWGQGTLVTVSSGGGGSGGGGSGGGGSEIVLTQSPGTLSLSPGERATLSCWLSQSVSSTYLAWYQQKPGQAPRLLIYDASSRAPGIPDRFSGSGSGTDFTLTISRLEPEDFAVYYCQQYSEWPLTFGQGTKVEIKGLAVSTISSFFPPGYQIYIWAPLAGTCGVLLLSLVITLYCKRGRKKLLYIFKQPFMRPVQTTQEEDGCSCRFPEEEEGGCELRVKFSRSADAPAYQQGQNQLYNELNLGRREEYDVLDKRRGRDPEMGGKPRRKNPQEGLYNELQKDKMAEAYSEIGMKGERRRGKGHDGLYQGLSTATKDTYDALHMQALPPR

SEQ ID NO: 8018 - protein, 482 aa, Artificial Sequence
  source: /note="Description of Artificial Sequence: Synthetic Chimeric Antigen Receptor"
MALPVTALLLPLALLLHAARPEVQLLESGGGLVQPGGSLRLSCAASGFTFSSYPMSWVRQAPGKGLEWVSAIGGSGGWSYYADSVKGRFTISRDNSKNTLYLQMNSLRAEDTAVYYCARYWPMDSWGQGTLVTVSSGGGGSGGGGSGGGGSEIVLTQSPGTLSLSPGERATLSCWLSQSVSSTYLAWYQQKPGQAPRLLIYDASSRAPGIPDRFSGSGSGTDFTLTISRLEPEDFAVYYCQQYSEWPLTFGQGTKVEIKTTTPAPRPPTPAPTIASQPLSLRPEACRPAAGGAVHTRGLDFACDIYIWAPLAGTCGVLLLSLVITLYCKRGRKKLLYIFKQPFMRPVQTTQEEDGCSCRFPEEEEGGCELRVKFSRSADAPAYQQGQNQLYNELNLGRREEYDVLDKRRGRDPEMGGKPRRKNPQEGLYNELQKDKMAEAYSEIGMKGERRRGKGHDGLYQGLSTATKDTYDALHMQALPPR

SEQ ID NO: 8019 - protein, 668 aa, Artificial Sequence
  source: /note="Description of Artificial Sequence: Synthetic Chimeric Antigen Receptor"
MALPVTALLLPLALLLHAARPEVQLLESGGGLVQPGGSLRLSCAASGFTFSSYPMSWVRQAPGKGLEWVSAIGGSGGWSYYADSVKGRFTISRDNSKNTLYLQMNSLRAEDTAVYYCARYWPMDSWGQGTLVTVSSGGGGSGGGGSGGGGSEIVLTQSPGTLSLSPGERATLSCWLSQSVSSTYLAWYQQKPGQAPRLLIYDASSRAPGIPDRFSGSGSGTDFTLTISRLEPEDFAVYYCQQYSEWPLTFGQGTKVEIKEPKSPDKTHTCPPCPAPPVAGPSVFLFPPKPKDTLMIARTPEVTCVVVDVSHEDPEVKFNWYVDGVEVHNAKTKPREEQYNSTYRVVSVLTVLHQDWLNGKEYKCKVSNKALPAPIEKTISKAKGQPREPQVYTLPPSRDELTKNQVSLTCLVKGFYPSDIAVEWESNGQPENNYKTTPPVLDSDGSFFLYSKLTVDKSRWQQGNVFSCSVMHEALHNHYTQKSLSLSPGKIYIWAPLAGTCGVLLLSLVITLYCKRGRKKLLYIFKQPFMRPVQTTQEEDGCSCRFPEEEEGGCELRVKFSRSADAPAYQQGQNQLYNELNLGRREEYDVLDKRRGRDPEMGGKPRRKNPQEGLYNELQKDKMAEAYSEIGMKGERRRGKGHDGLYQGLSTATKDTYDALHMQALPPR

SEQ ID NO: 8020 - protein, 373 aa, Artificial Sequence
  source: /note="Description of Artificial Sequence: Synthetic Chimeric Antigen Receptor"
PGWFLDSPDRPWNPPTFSPALLVVTEGDNATFTCSFSNTSESFVLNWYRMSPSNQTDKLAAFPEDRSQPGQDCRFRVTQLPNGRDFHMSVVRARRNDSGTYLCGAISLAPKAQIKESLRAELRVTERRAEVPTAHPSPSPRPAGQFQTLVTTTPAPRPPTPAPTIASQPLSLRPEACRPAAGGAVHTRGLDFACDIYIWAPLAGTCGVLLLSLVITLYCKRGRKKLLYIFKQPFMRPVQTTQEEDGCSCRFPEEEEGGCELRVKFSRSADAPAYKQGQNQLYNELNLGRREEYDVLDKRRGRDPEMGGKPRRKNPQEGLYNELQKDKMAEAYSEIGMKGERRRGKGHDGLYQGLSTATKDTYDALHMQALPPR

SEQ ID NO: 8021 - protein, 394 aa, Artificial Sequence; identical to SEQ ID NO: 7991
  source: /note="Description of Artificial Sequence: Synthetic Chimeric Antigen Receptor"

SEQ ID NO: 8022 - protein, 372 aa, Artificial Sequence
  source: /note="Description of Artificial Sequence: Synthetic Chimeric Antigen Receptor"
PGWFLDSPDRPWNPPTFSPALLVVTEGDNATFTCSFSNTSESFVLNWYRMSPSNQTDKLAAFPEDRSQPGQDCRFRVTQLPNGRDFHMSVVRARRNDSGTVLCGAISLAPKAQIKESHAELRVTERRAEVPTAHPSPSPRPAGQFQTLVTTTPAPRPPTPAPTIASQPLSLRPEACRPAAGGAVHTRGLDFACDIYIWAPLAGTCGVLLLSLVITLYCKRGRKKLLYIFKQPFMRPVQTTQEEDGCSCRFPEEEEGGCELRVKFSRSADAPAYKQGQNQLYNELNLGRREEYDVLDKRRGRDPEMGGKPRRKNPQEGLYNELQKDKMAEAYSEIGMKGERRRGKGHDGLYQGLSTATKDTYDALHMQALPPR

SEQ ID NO: 8023 - protein, 394 aa, Artificial Sequence; identical to SEQ ID NO: 7991
  source: /note="Description of Artificial Sequence: Synthetic Chimeric Antigen Receptor"

SEQ ID NO: 8024 - protein, 488 aa, Artificial Sequence
  source: /note="Description of Artificial Sequence: Synthetic Chimeric Antigen Receptor"
MALPVTALLLPLALLLHAARPQVQLQQSGAEVKKPGASVKVSCKASGYTFTGYYMHWVRQAPGQGLEWMGRINPNSGGTNYAQKFQGRVTMTRDTSISTAYMELSRLRSEDTAVYYCARGRYYGMDVWGQGTMVTVSSGGGGSGGGGSGGGGSGGGGSEIVLTQSPATLSLSPGERATISCRASQSVSSNFAWYQQRPGQAPRLLIYDASNRATGIPPRFSGSGSGTDFTLTISSLEPEDFAAYYCHQRSNWLYTFGQGTKVDIKTTTPAPRPPTPAPTIASQPLSLRPEACRPAAGGAVHTRGLDFACDIYIWAPLAGTCGVLLLSLVITLYCKRGRKKLLYIFKQPFMRPVQTTQEEDGCSCRFPEEEEGGCELRVKFSRSADAPAYKQGQNQLYNELNLGRREEYDVLDKRRGRDPEMGGKPRRKNPQEGLYNELQKDKMAEAYSEIGMKGERRRGKGHDGLYQGLSTATKDTYDALHMQALPPR

SEQ ID NO: 8025 - protein, 497 aa, Artificial Sequence
  source: /note="Description of Artificial Sequence: Synthetic Chimeric Antigen Receptor"
MALPVTALLLPLALLLHAARPQVQLVQSGAEVKKPGASVKVSCKASGYTFTGYYMHWVRQAPGQGLEWMGWINPNSGGTNYAQKFQGRVTMTRDTSISTAYMELSRLRSDDTAVYYCARDLRRTVVTPRAYYGMDVWGQGTTVTVSSGGGGSGGGGSGGGGSGGGGSDIQLTQSPSTLSASVGDRVTITCQASQDISNSLNWYQQKAGKAPKLLIYDASTLETGVPSRFSGSGSGTDFSFTISSLQPEDIATYYCQQHDNLPLTFGQGTKVEIKTTTPAPRPPTPAPTIASQPLSLRPEACRPAAGGAVHTRGLDFACDIYIWAPLAGTCGVLLLSLVITLYCKRGRKKLLYIFKQPFMRPVQTTQEEDGCSCRFPEEEEGGCELRVKFSRSADAPAYKQGQNQLYNELNLGRREEYDVLDKRRGRDPEMGGKPRRKNPQEGLYNELQKDKMAEAYSEIGMKGERRRGKGHDGLYQGLSTATKDTYDALHMQALPPR

SEQ ID NO: 8026 - protein, 490 aa, Artificial Sequence
  source: /note="Description of Artificial Sequence: Synthetic Chimeric Antigen Receptor"
MALPVTALLLPLALLLHAARPQVQLVQSGAEVKKPGAPVKVSCKASGYTFTGYYMHWVRQAPGQGLEWMGWINPNSGGTNYAQKFQGRVTMTRDTSISTAYMELSRLRSDDTAVYYCARGEWDGSYYYDYWGQGTLVTVSSGGGGSGGGGSGGGGSGGGGSDIVLTQTPSSLSASVGDRVTITCRASQSINTYLNWYQHKPGKAPKLLIYAASSLQSGVPSRFSGSGSGTDFTLTISSLQPEDFATYYCQQSFSPLTFGGGTKLEIKTTTPAPRPPTPAPTIASQPLSLRPEACRPAAGGAVHTRGLDFACDIYIWAPLAGTCGVLLLSLVITLYCKRGRKKLLYIFKQPFMRPVQTTQEEDGCSCRFPEEEEGGCELRVKFSRSADAPAYKQGQNQLYNELNLGRREEYDVLDKRRGRDPEMGGKPRRKNPQEGLYNELQKDKMAEAYSEIGMKGERRRGKGHDGLYQGLSTATKDTYDALHMQALPPR

SEQ ID NO: 8027 - protein, 486 aa, Artificial Sequence
  source: /note="Description of Artificial Sequence: Synthetic Chimeric Antigen Receptor"
MALPVTALLLPLALLLHAARPQVQLVESGGGLVQPGGSLRLSCAASGFTFSSYWMHWVRQVPGKGLVWVSRINTDGSTTTYADSVEGRFTISRDNAKNTLYLQMNSLRDDDTAVYYCVGGHWAVWGQGTTVTVSSGGGGSGGGGSGGGGSGGGGSDIQMTQSPSTLSASVGDRVTITCRASQSISDRLAWYQQKPGKAPKLLIYKASSLESGVPSRFSGSGSGTEFTLTISSLQPDDFAVYYCQQYGHLPMYTFGQGTKVEIKTTTPAPRPPTPAPTIASQPLSLRPEACRPAAGGAVHTRGLDFACDIYIWAPLAGTCGVLLLSLVITLYCKRGRKKLLYIFKQPFMRPVQTTQEEDGCSCRFPEEEEGGCELRVKFSRSADAPAYKQGQNQLYNELNLGRREEYDVLDKRRGRDPEMGGKPRRKNPQEGLYNELQKDKMAEAYSEIGMKGERRRGKGHDGLYQGLSTATKDTYDALHMQALPPR

SEQ ID NO: 8028 - protein, 485 aa, Artificial Sequence
  source: /note="Description of Artificial Sequence: Synthetic Chimeric Antigen Receptor"
MALPVTALLLPLALLLHAARPQVQLVQSGAEVEKPGASVKVSCKASGYTFTDYYMHWVRQAPGQGLEWMGWINPNSGGTNYAQKFQGRVTMTRDTSISTAYMELSRLRSDDTAVYYCASGWDFDYWGQGTLVTVSSGGGGSGGGGSGGGGSGGGGSDIVMTQSPSSLSASVGDRVTITCRASQSIRYYLSWYQQKPGKAPKLLIYTASILQNGVPSRFSGSGSGTDFTLTISSLQPEDFATYYCLQTYTTPDFGPGTKVEIKTTTPAPRPPTPAPTIASQPLSLRPEACRPAAGGAVHTRGLDFACDIYIWAPLAGTCGVLLLSLVITLYCKRGRKKLLYIFKQPFMRPVQTTQEEDGCSCRFPEEEEGGCELRVKFSRSADAPAYKQGQNQLYNELNLGRREEYDVLDKRRGRDPEMGGKPRRKNPQEGLYNELQKDKMAEAYSEIGMKGERRRGKGHDGLYQGLSTATKDTYDALHMQALPPR

SEQ ID NO: 8029 - protein, 497 aa, Artificial Sequence
  source: /note="Description of Artificial Sequence: Synthetic Chimeric Antigen Receptor"
MALPVTALLLPLALLLHAARPQVQLVQSGAEVKKPGASVKVSCKASGYTFTSYYMHWVRQAPGQGLEWMGIINPSGGSTSYAQKFQGRVTMTRDTSTSTVYMELSSLRSEDTAVYYCARYRLIAVAGDYYYYGMDVWGQGTMVTVSSGGGGSGGGGSGGGGSGGGGSDIQMTQSPSSVSASVGDRVTITCRASQGVGRWLAWYQQKPGTAPKLLIYAASTLQSGVPSRFSGSGSGTDFTLTINNLQPEDFATYYCQQANSFPLTFGGGTRLEIKTTTPAPRPPTPAPTIASQPLSLRPEACRPAAGGAVHTRGLDFACDIYIWAPLAGTCGVLLLSLVITLYCKRGRKKLLYIFKQPFMRPVQTTQEEDGCSCRFPEEEEGGCELRVKFSRSADAPAYKQGQNQLYNELNLGRREEYDVLDKRRGRDPEMGGKPRRKNPQEGLYNELQKDKMAEAYSEIGMKGERRRGKGHDGLYQGLSTATKDTYDALHMQALPPR

SEQ ID NO: 8030 - protein, 494 aa, Artificial Sequence
  source: /note="Description of Artificial Sequence: Synthetic Chimeric Antigen Receptor"
MALPVTALLLPLALLLHAARPQVQLVQSGGGVVQPGRSLRLSCAASGFTFSSYAMHWVRQAPGKGLEWVAVISYDGSNKYYADSVKGRFTISRDNSKNTLYLQMNSLRAEDTAVYYCARWKVSSSSPAFDYWGQGTLVTVSSGGGGSGGGGSGGGGSGGGGSEIVLTQSPATLSLSPGERAILSCRASQSVYTKYLGWYQQKPGQAPRLLIYDASTRATGIPDRFSGSGSGTDFTLTINRLEPEDFAVYYCQHYGGSPLITFGQGTRLEIKTTTPAPRPPTPAPTIASQPLSLRPEACRPAAGGAVHTRGLDFACDIYIWAPLAGTCGVLLLSLVITLYCKRGRKKLLYIFKQPFMRPVQTTQEEDGCSCRFPEEEEGGCELRVKFSRSADAPAYKQGQNQLYNELNLGRREEYDVLDKRRGRDPEMGGKPRRKNPQEGLYNELQKDKMAEAYSEIGMKGERRRGKGHDGLYQGLSTATKDTYDALHMQALPPR

SEQ ID NO: 8031 - protein, 490 aa, Artificial Sequence
  source: /note="Description of Artificial Sequence: Synthetic Chimeric Antigen Receptor"
MALPVTALLLPLALLLHAARPQVQLQQSGAEVKKPGASVKVSCKTSGYPFTGYSLHWVRQAPGQGLEWMGWINPNSGGTNYAQKFQGRVTMTRDTSISTAYMELSRLRSDDTAVYYCARDHYGGNSLFYWGQGTLVTVSSGGGGSGGGGSGGGGSGGGGSDIQLTQSPSSISASVGDTVSITCRASQDSGTWLAWYQQKPGKAPNLLMYDASTLEDGVPSRFSGSASGTEFTLTVNRLQPEDSATYYCQQYNSYPLTFGGGTKVDIKTTTPAPRPPTPAPTIASQPLSLRPEACRPAAGGAVHTRGLDFACDIYIWAPLAGTCGVLLLSLVITLYCKRGRKKLLYIFKQPFMRPVQTTQEEDGCSCRFPEEEEGGCELRVKFSRSADAPAYKQGQNQLYNELNLGRREEYDVLDKRRGRDPEMGGKPRRKNPQEGLYNELQKDKMAEAYSEIGMKGERRRGKGHDGLYQGLSTATKDTYDALHMQALPPR

SEQ ID NO: 8032 - protein, 492 aa, Artificial Sequence
  source: /note="Description of Artificial Sequence: Synthetic Chimeric Antigen Receptor"
MALPVTALLLPLALLLHAARPQVQLVQSGAEVKKPGASVEVSCKASGYTFTSYYMHWVRQAPGQGLEWMGIINPSGGSTGYAQKFQGRVTMTRDTSTSTVHMELSSLRSEDTAVYYCARGGYSSSSDAFDIWGQGTMVTVSSGGGGSGGGGSGGGGSGGGGSDIQMTQSPPSLSASVGDRVTITCRASQDISSALAWYQQKPGTPPKLLIYDASSLESGVPSRFSGSGSGTDFTLTISSLQPEDFATYYCQQFSSYPLTFGGGTRLEIKTTTPAPRPPTPAPTIASQPLSLRPEACRPAAGGAVHTRGLDFACDIYIWAPLAGTCGVLLLSLVITLYCKRGRKKLLYIFKQPFMRPVQTTQEEDGCSCRFPEEEEGGCELRVKFSRSADAPAYKQGQNQLYNELNLGRREEYDVLDKRRGRDPEMGGKPRRKNPQEGLYNELQKDKMAEAYSEIGMKGERRRGKGHDGLYQGLSTATKDTYDALHMQALPPR

SEQ ID NO: 8033 - protein, 499 aa, Artificial Sequence
  source: /note="Description of Artificial Sequence: Synthetic Chimeric Antigen Receptor"
MALPVTALLLPLALLLHAARPQVQLVQSGAEVKKPGASVKVSCKASGYTFTSYGISWVRQAPGQGLEWMGWISAYNGNTNYAQKLQGRVTMTTDTSTSTAYMELRSLRSDDTAVYYCARVAGGIYYYYGMDVWGQGTTITVSSGGGGSGGGGSGGGGSGGGGSDIVMTQTPDSLAVSLGERATISCKSSHSVLYNRNNKNYLAWYQQKPGQPPKLLFYWASTRKSGVPDRFSGSGSGTDFTLTISSLQPEDFATYFCQQTQTFPLTFGQGTRLEINTTTPAPRPPTPAPTIASQPLSLRPEACRPAAGGAVHTRGLDFACDIYIWAPLAGTCGVLLLSLVITLYCKRGRKKLLYIFKQPFMRPVQTTQEEDGCSCRFPEEEEGGCELRVKFSRSADAPAYKQGQNQLYNELNLGRREEYDVLDKRRGRDPEMGGKPRRKNPQEGLYNELQKDKMAEAYSEIGMKGERRRGKGHDGLYQGLSTATKDTYDALHMQALPPR

SEQ ID NO: 8034 - protein, 485 aa, Artificial Sequence
  source: /note="Description of Artificial Sequence: Synthetic Chimeric Antigen Receptor"
MALPVTALLLPLALLLHAARPQVQLQQSGAEVKKPGASVKVSCKASGYTFTGYYMHWVRQAPGQGLEWMGWINPNSGGTNYAQNFQGRVTMTRDTSISTAYMELRRLRSDDTAVYYCASGWDFDYWGQGTLVTVSSGGGGSGGGGSGGGGSGGGGSDIRMTQSPSSLSASVGDRVTITCRASQSIRYYLSWYQQKPGKAPKLLIYTASILQNGVPSRFSGSGSGTDFTLTISSLQPEDFATYYCLQTYTTPDFGPGTKVEIKTTTPAPRPPTPAPTIASQPLSLRPEACRPAAGGAVHTRGLDFACDIYIWAPLAGTCGVLLLSLVITLYCKRGRKKLLYIFKQPFMRPVQTTQEEDGCSCRFPEEEEGGCELRVKFSRSADAPAYKQGQNQLYNELNLGRREEYDVLDKRRGRDPEMGGKPRRKNPQEGLYNELQKDKMAEAYSEIGMKGERRRGKGHDGLYQGLSTATKDTYDALHMQALPPR

SEQ ID NO: 8035 - protein, 490 aa, Artificial Sequence
  source: /note="Description of Artificial Sequence: Synthetic Chimeric Antigen Receptor"
MALPVTALLLPLALLLHAARPQVQLVQSGAEVKKPGASVKVSCKASGYTFTGYYMHWVRQAPGQGLEWMGRINPNSGGTNYAQKFQGRVTMTTDTSTSTAYMELRSLRSDDTAVYYCARTTTSYAFDIWGQGTMVTVSSGGGGSGGGGSGGGGSGGGGSDIQLTQSPSTLSASVGDRVTITCRASQSISTWLAWYQQKPGKAPNLLIYKASTLESGVPSRFSGSGSGTEFTLTISSLQPDDFATYYCQQYNTYSPYTFGQGTKLEIKTTTPAPRPPTPAPTIASQPLSLRPEACRPAAGGAVHTRGLDFACDIYIWAPLAGTCGVLLLSLVITLYCKRGRKKLLYIFKQPFMRPVQTTQEEDGCSCRFPEEEEGGCELRVKFSRSADAPAYKQGQNQLYNELNLGRREEYDVLDKRRGRDPEMGGKPRRKNPQEGLYNELQKDKMAEAYSEIGMKGERRRGKGHDGLYQGLSTATKDTYDALHMQALPPR

SEQ ID NO: 8036 - protein, 493 aa, Artificial Sequence
  source: /note="Description of Artificial Sequence: Synthetic Chimeric Antigen Receptor"
MALPVTALLLPLALLLHAARPQVQLVQSGGGLVKPGGSLRLSCEASGFIFSDYYMGWIRQAPGKGLEWVSYIGRSGSSMYYADSVKGRFTFSRDNAKNSLYLQMNSLRAEDTAVYYCAASPVVAATEDFQHWGQGTLVTVSSGGGGSGGGGSGGGGSGGGGSDIVMTQTPATLSLSPGERATLSCRASQSVTSNYLAWYQQKPGQAPRLLLFGASTRATGIPDRFSGSGSGTDFTLTINRLEPEDFAMYYCQQYGSAPVTFGQGTKLEIKTTTPAPRPPTPAPTIASQPLSLRPEACRPAAGGAVHTRGLDFACDIYIWAPLAGTCGVLLLSLVITLYCKRGRKKLLYIFKQPFMRPVQTTQEEDGCSCRFPEEEEGGCELRVKFSRSADAPAYKQGQNQLYNELNLGRREEYDVLDKRRGRDPEMGGKPRRKNPQEGLYNELQKDKMAEAYSEIGMKGERRRGKGHDGLYQGLSTATKDTYDALHMQALPPR

SEQ ID NO: 8037 - protein, 493 aa, Artificial Sequence
  source: /note="Description of Artificial Sequence: Synthetic Chimeric Antigen Receptor"
MALPVTALLLPLALLLHAARPQVQLVQSGAEVRAPGASVKISCKASGFTFRGYYIHWVRQAPGQGLEWMGIINPSGGSRAYAQKFQGRVTMTRDTSTSTVYMELSSLRSDDTAMYYCARTASCGGDCYYLDYWGQGTLVTVSSGGGGSGGGGSGGGGSGGGGSDIQMTQSPPTLSASVGDRVTITCRASENVNIWLAWYQQKPGKAPKLLIYKSSSLASGVPSRFSGSGSGAEFTLTISSLQPDDFATYYCQQYQSYPLTFGGGTKVDIKTTTPAPRPPTPAPTIASQPLSLRPEACRPAAGGAVHTRGLDFACDIYIWAPLAGTCGVLLLSLVITLYCKRGRKKLLYIFKQPFMRPVQTTQEEDGCSCRFPEEEEGGCELRVKFSRSADAPAYKQGQNQLYNELNLGRREEYDVLDKRRGRDPEMGGKPRRKNPQEGLYNELQKDKMAEAYSEIGMKGERRRGKGHDGLYQGLSTATKDTYDALHMQALPPR

SEQ ID NO: 8038 - protein, 488 aa, Artificial Sequence
  source: /note="Description of Artificial Sequence: Synthetic Chimeric Antigen Receptor"
MALPVTALLLPLALLLHAARPQVQLVQSGGGLVQPGRSLRLSCAASGFTFDDYAMHWVRQAPGKGLEWVSGISWNSGSIGYADSVKGRFTISRDNAKNSLYLQMNSLRAEDTAVYYCAKDGSSSWSWGYFDYWGQGTLVTVSSGGGGSGGGGSGGGGSSSELTQDPAVSVALGQTVRTTCQGDALRSYYASWYQQKPGQAPMLVIYGKNNRPSGIPDRFSGSDSGDTASLTITGAQAEDEADYYCNSRDSSGYPVFGTGTKVTVLTTTPAPRPPTPAPTIASQPLSLRPEACRPAAGGAVHTRGLDFACDIYIWAPLAGTCGVLLLSLVITLYCKRGRKKLLYIFKQPFMRPVQTTQEEDGCSCRFPEEEEGGCELRVKFSRSADAPAYKQGQNQLYNELNLGRREEYDVLDKRRGRDPEMGGKPRRKNPQEGLYNELQKDKMAEAYSEIGMKGERRRGKGHDGLYQGLSTATKDTYDALHMQALPPR

SEQ ID NO: 8039 - protein, 490 aa, Artificial Sequence
  source: /note="Description of Artificial Sequence: Synthetic Chimeric Antigen Receptor"
MALPVTALLLPLALLLHAARPEVQLVESGGGLVQPGRSLRLSCAASGFTFDDYAMHWVRQAPGKGLEWVSGISWNSGSTGYADSVKGRFTISRDNAKNSLYLQMNSLRAEDTALYYCAKDSSSWYGGGSAFDIWGQGTMVTVSSGGGGSGGGGSGGGGSSSELTQEPAVSVALGQTVRITCQGDSLRSYYASWYQQKPGQAPVLVIFGRSRRPSGIPDRFSGSSSGNTASLIITGAQAEDEADYYCNSRDNTANHYVFGTGTKLTVLTTTPAPRPPTPAPTIASQPLSLRPEACRPAAGGAVHTRGLDFACDIYIWAPLAGTCGVLLLSLVITLYCKRGRKKLLYIFKQPFMRPVQTTQEEDGCSCRFPEEEEGGCELRVKFSRSADAPAYKQGQNQLYNELNLGRREEYDVLDKRRGRDPEMGGKPRRKNPQEGLYNELQKDKMAEAYSEIGMKGERRRGKGHDGLYQGLSTATKDTYDALHMQALPPR

SEQ ID NO: 8040 - protein, 490 aa, Artificial Sequence
  source: /note="Description of Artificial Sequence: Synthetic Chimeric Antigen Receptor"
MALPVTALLLPLALLLHAARPEVQLVESGGGLVQPGRSLRLSCAASGFTFDDYAMHWVRQAPGKGLEWVSGISWNSGSTGYADSVKGRFTISRDNAKNSLYLQMNSLRAEDTALYYCAKDSSSWYGGGSAFDIWGQGTMVTVSSGGGGSGGGGSGGGGSSSELTQDPAVSVALGQTVRITCQGDSLRSYYASWYQQKPGQAPVLVIYGKNNRPSGIPDRFSGSSSGNTASLTITGAQAEDEADYYCNSRGSSGNHYVFGTGTKVTVLTTTPAPRPPTPAPTIASQPLSLRPEACRPAAGGAVHTRGLDFACDIYIWAPLAGTCGVLLLSLVITLYCKRGRKKLLYIFKQPFMRPVQTTQEEDGCSCRFPEEEEGGCELRVKFSRSADAPAYKQGQNQLYNELNLGRREEYDVLDKRRGRDPEMGGKPRRKNPQEGLYNELQKDKMAEAYSEIGMKGERRRGKGHDGLYQGLSTATKDTYDALHMQALPPR

SEQ ID NO: 8041 - protein, 495 aa, Artificial Sequence
  source: /note="Description of Artificial Sequence: Synthetic Chimeric Antigen Receptor"
MALPVTALLLPLALLLHAARPQVQLVQSGGGLVQPGGSLRLSCAASGFTFSSYWMHWVRQAPGKGLVWVSRINSDGSSTSYADSVKGRFTISRDNAKNTLYLQMNSLRAEDTAVYYCVRTGWVGSYYYYMDVWGKGTTVTVSSGGGGSGGGGSGGGGSGGGGSEIVLTQSPGTLSLSPGERATLSCRASQSVSSNYLAWYQQKPGQPPRLLIYDVSTRATGIPARFSGGGSGTDFTLTISSLEPEDFAVYYCQQRSNWPPWTFGQGTKVEIKTTTPAPRPPTPAPTIASQPLSLRPEACRPAAGGAVHTRGLDFACDIYIWAPLAGTCGVLLLSLVITLYCKRGRKKLLYIFKQPFMRPVQTTQEEDGCSCRFPEEEEGGCELRVKFSRSADAPAYKQGQNQLYNELNLGRREEYDVLDKRRGRDPEMGGKPRRKNPQEGLYNELQKDKMAEAYSEIGMKGERRRGKGHDGLYQGLSTATKDTYDALHMQALPPR

SEQ ID NO: 8042 - protein, 494 aa, Artificial Sequence
  source: /note="Description of Artificial Sequence: Synthetic Chimeric Antigen Receptor"
MALPVTALLLPLALLLHAARPQVQLVQSGGGVVQPGRSLRLSCAASGFTFSSYGMHWVRQAPGKGLEWVAVISYDGSNKYYADSVKGRFTISRDNSKNTLYLQMNSLRAEDTAVYYCAKGYSRYYYYGMDVWGQGTTVTVSSGGGGSGGGGSGGGGSGGGGSEIVMTQSPATLSLSPGERAILSCRASQSVYTKYLGWYQQKPGQAPRLLIYDASTRATGIPDRFSGSGSGTDFTLTINRLEPEDFAVYYCQHYGGSPLITFGQGTKVDIKTTTPAPRPPTPAPTIASQPLSLRPEACRPAAGGAVHTRGLDFACDIYIWAPLAGTCGVLLLSLVITLYCKRGRKKLLYIFKQPFMRPVQTTQEEDGCSCRFPEEEEGGCELRVKFSRSADAPAYKQGQNQLYNELNLGRREEYDVLDKRRGRDPEMGGKPRRKNPQEGLYNELQKDKMAEAYSEIGMKGERRRGKGHDGLYQGLSTATKDTYDALHMQALPPR

SEQ ID NO: 8043 - protein, 493 aa, Artificial Sequence
  source: /note="Description of Artificial Sequence: Synthetic Chimeric Antigen Receptor"
MALPVTALLLPLALLLHAARPQVQLVQSGGGLVQPGGSLRLSCAASGFTFSSYAMSWVRQAPGKGLEWVSAISGSGGSTYYADSVKGRFTISRDNSKNTLYLQMNSLRAEDTAVYYCAKREAAAGHDWYFDLWGRGTLVTVSSGGGGSGGGGSGGGGSGGGGSDIRVTQSPSSLSASVGDRVTITCRASQSISSYLNWYQQKPGKAPKLLIYAASSLQSGVPSRFSGSGSGTDFTLTISSLQPEDFATYYCQQSYSIPLTFGQGTKVEIKTTTPAPRPPTPAPTIASQPLSLRPEACRPAAGGAVHTRGLDFACDIYIWAPLAGTCGVLLLSLVITLYCKRGRKKLLYIFKQPFMRPVQTTQEEDGCSCRFPEEEEGGCELRVKFSRSADAPAYKQGQNQLYNELNLGRREEYDVLDKRRGRDPEMGGKPRRKNPQEGLYNELQKDKMAEAYSEIGMKGERRRGKGHDGLYQGLSTATKDTYDALHMQALPPR

SEQ ID NO: 8044 - protein, 491 aa, Artificial Sequence
  source: /note="Description of Artificial Sequence: Synthetic Chimeric Antigen Receptor"
MALPVTALLLPLALLLHAARPQVQLVQSWAEVKKPGASVKVSCKASGYTFTSYYMHWVRQAPGQGLEWMGIINPSGGSTSYAQKFQGRVTMTRDTSTSTVYMELSNLRSEDTAVYYCARSPRVTTGYFDYWGQGTLVTVSSGGGGSGGGGSGGGGSGGGGSDIQLTQSPSTLSASVGDRVTITCRASQSISSWLAWYQQKPGKAPKLLIYKASSLESGVPSRFSGSGSGTEFTLTISSLQPDDFATYYCQQYSSYPLTFGGGTRLEIKTTTPAPRPPTPAPTIASQPLSLRPEACRPAAGGAVHTRGLDFACDIYIWAPLAGTCGVLLLSLVITLYCKRGRKKLLYIFKQPFMRPVQTTQEEDGCSCRFPEEEEGGCELRVKFSRSADAPAYKQGQNQLYNELNLGRREEYDVLDKRRGRDPEMGGKPRRKNPQEGLYNELQKDKMAEAYSEIGMKGERRRGKGHDGLYQGLSTATKDTYDALHMQALPPR

SEQ ID NO: 8045 - protein, 497 aa, Artificial Sequence
  source: /note="Description of Artificial Sequence: Synthetic Chimeric Antigen Receptor"
MALPVTALLLPLALLLHAARPQVQLVQSGAEVRRPGASVKISCRASGDTSTRHYIHWLRQAPGQGPEWMGVINPTTGPATGSPAYAQMLQGRVTMTRDTSTRTVYMELRSLRFEDTAVYYCARSVVGRSAPYYFDYWGQGTLVTVSSGGGGSGGGGSGGGGSGGGGSDIQMTQSPSSLSASVGDRVTITCRASQGISDYSAWYQQKPGKAPKLLIYAASTLQSGVPSRFSGSGSGTDFTLTISYLQSEDFATYYCQQYYSYPLTFGGGTKVDIKTTTPAPRPPTPAPTIASQPLSLRPEACRPAAGGAVHTRGLDFACDIYIWAPLAGTCGVLLLSLVITLYCKRGRKKLLYIFKQPFMRPVQTTQEEDGCSCRFPEEEEGGCELRVKFSRSADAPAYKQGQNQLYNELNLGRREEYDVLDKRRGRDPEMGGKPRRKNPQEGLYNELQKDKMAEAYSEIGMKGERRRGKGHDGLYQGLSTATKDTYDALHMQALPPR

SEQ ID NO: 8046 - protein, 493 aa, Artificial Sequence
  source: /note="Description of Artificial Sequence: Synthetic Chimeric Antigen Receptor"
MALPVTALLLPLALLLHAARPQVQLQQSGAEVKKPGASVKVSCKASGYTFTNYYMHWVRQAPGQGLEWMGIINPSGGYTTYAQKFQGRLTMTRDTSTSTVYMELSSLRSEDTAVYYCARIRSCGGDCYYFDNWGQGTLVTVSSGGGGSGGGGSGGGGSGGGGSDIQLTQSPSTLSASVGDRVTITCRASENVNIWLAWYQQKPGKAPKLLIYKSSSLASGVPSRFSGSGSGAEFTLTISSLQPDDFATYYCQQYQSYPLTFGGGTKVDIKTTTPAPRPPTPAPTIASQPLSLRPEACRPAAGGAVHTRGLDFACDIYIWAPLAGTCGVLLLSLVITLYCKRGRKKLLYIFKQPFMRPVQTTQEEDGCSCRFPEEEEGGCELRVKFSRSADAPAYKQGQNQLYNELNLGRREEYDVLDKRRGRDPEMGGKPRRKNPQEGLYNELQKDKMAEAYSEIGMKGERRRGKGHDGLYQGLSTATKDTYDALHMQALPPR

SEQ ID NO: 8047 - protein, 490 aa, Artificial Sequence
  source: /note="Description of Artificial Sequence: Synthetic Chimeric Antigen Receptor"
MALPVTALLLPLALLLHAARPQITLKESGPALVKPTQTLTLTCTFSGFSLSTAGVHVGWIRQPPGKALEWLALISWADDKRYRPSLRSRLDITRVTSKDQVVLSMTNMQPEDTATYYCALQGFDGYEANWGPGTLVTVSSGGGGSGGGGSGGGGSGGGGSDIVMTQSPSSLSASAGDRVTITCRASRGISSALAWYQQKPGKPPKLLIYDASSLESGVPSRFSGSGSGTDFTLTIDSLEPEDFATYYCQQSYSTPWTFGQGTKVDIKTTTPAPRPPTPAPTIASQPLSLRPEACRPAAGGAVHTRGLDFACDIYIWAPLAGTCGVLLLSLVITLYCKRGRKKLLYIFKQPFMRPVQTTQEEDGCSCRFPEEEEGGCELRVKFSRSADAPAYKQGQNQLYNELNLGRREEYDVLDKRRGRDPEMGGKPRRKNPQEGLYNELQKDKMAEAYSEIGMKGERRRGKGHDGLYQGLSTATKDTYDALHMQALPPR

SEQ ID NO: 8048 - protein, 390 aa, Artificial Sequence
  source: /note="Description of Artificial Sequence: Synthetic Chimeric Antigen Receptor"
MALPVTALLLPLALLLHAARPPGWFLDSPDRPWPPTFSPALLVVTEGDNATFTCSFSNTSESFVLNWYRMSPSNQTDKLAAFPEDRSQPGQDCRFRVTQLPNGRDFHMSVWARRDSGTYLCGAISLAPKAQIKESLRAELRVTERRAEVPTAHPSPSPRPAGQFQTLVTTTPAPRPPTPAPTIASQPLSLRPEACRPAAGGAVHTRGLDFACDRYIWAPLAGTCGVLLLSLVITLYCKRGRKKLLYIFKQPFMRPVQTTQEEDGCSCRFPEEEEGGCELRVKFSRSADAPAYKQGQNQLYNELNLGRREEYDVLDKRRGRDPEMGGKPRRKPQEGLYNELQKDKMAEAYSEIGMKGERRRGKGHDGLYQGLSTATKDTYDALHMQALPPR

SEQ ID NO: 8049 - protein, 394 aa, Artificial Sequence; identical to SEQ ID NO: 7991
  source: /note="Description of Artificial Sequence: Synthetic Chimeric Antigen Receptor"

SEQ ID NO: 8050 - protein, 394 aa, Artificial Sequence
  source: /note="Description of Artificial Sequence: Synthetic Chimeric Antigen Receptor"
MALPVTALLLPLALLLHAARPPGWFLDSPDRPWNPPTFSPALLVVTEGDNATFTCSFSNTSESFVLNWVRMSPSNQTDKLAAFPEDRSQPGQDCRFRVTQLPNGRDFHMSVVRARRNDSGTVLCGAISLAPKAQIKESLRAELRVTERRAEVPTAHPSPSPRPAGQFQTLVTTTPAPRPPTPAPTIASQPLSLRPEACRPAAGGAVHTRGLDFACDIYIWAPLAGTCGVLLLSLVITLYCKRGRKKLLYIFKQPFMRPVQTTQEEDGCSCRFPEEEEGGCELRVKFSRSADAPAYKQGQNQLYNELNLGRREEYDVLDKRRGRDPEMGGKPRRKNPQEGLYNELQKDKMAEAYSEIGMKGERRRGKGHDGLYQGLSTATKDTYDALHMQALPPR

SEQ ID NO: 8051 - protein, 386 aa, Artificial Sequence
  source: /note="Description of Artificial Sequence: Synthetic Chimeric Antigen Receptor"
MALPVTALLLPLALLLHAARPGSGSGAQAAEVQLQQSGPELVKPGTSVRISCKTSGYTFTEYTIHWVKQSHGKSLEWIGNINPNNGGTTYNQKFEDKATLTVDKSSSTAYMELRSLTSEDSAVYYCAAGWNFDYWGQGTTVTVSSGGGGSGGGGSGGGGSDIVMTQSHKFMSTSVGDRVSIICKASQDVGTAVDWYQQKPGQSPKLLIYWASTRHTGVPDRFTGSGSGTDFTLTITNVQSEDLADYFCQQYNSYPLTFGAGTMLDLKRAAARSDPASGAGSGSGSAIELLPVPGAKKSAKLYIPYIILTIIILTIVGFIWLLKVNGCRKYKLNKTESTPVVEEDEMQPYASYTEKNNPLYDTTNKVKASEALQSEVDTDLHTLSHG

SEQ ID NO: 8052 - protein, 373 aa, Artificial Sequence; identical to SEQ ID NO: 8020
  source: /note="Description of Artificial Sequence: Synthetic Chimeric Antigen Receptor"

SEQ ID NO: 8053 - protein, 354 aa, Artificial Sequence
  source: /note="Description of Artificial Sequence: Synthetic Chimeric Antigen Receptor"
MALPVTALLLPLALLLHAARPPGWFLDSPDRPWNPPTFSPALLVVTEGDNATFTCSFSNTSESFYLNWYRMSPSNQTDKLAAFPEDRSQPGQDCRFRVTQLPNGRDFHMSVYRARRNDSGTYLCGAISLAPKAQIKESLRAELRVTERRAEVPTAHPSPSPRPAGQFQTLVTTTPAPRPPTPAPTIASQPLSLRPEACRPAAGGAVHTRGLDFACDIYIWAPLAGDGCSCRFPEEEEGGCELRVKFSRSADAPAYKQGQNQLYNELNLGRREEYDVLDKRRGRDPEMGGKPRRKNPQEGLYNELQKDKMAEAYSEIGMKGERRRGKGHDGLYQGLSTATKDTYDALHMQALPPR

SEQ ID NO: 8054 - protein, 373 aa, Artificial Sequence
  source: /note="Description of Artificial Sequence: Synthetic Chimeric Antigen Receptor"
PGWFLDSPDRPWNPPTFSPALLVVTEGDNATFTCSFSNTSESFYLNWYRMSPSNQTDKLAAFPEDRSQPGQDCRFRVTQLPNGRDFHMSVYRARRNDSGTYLCGAISLAPKAQIKESLRAELRVTERRAEVPTAHPSPSPRPAGQFQTLVTTTPAPRPPTPAPTIASQPLSLRPEACRPAAGGAVHTRGLDFACDIYIWAPLAGTCGVLLLSLVITLYCKRGRKKLLYIFKQPFMRPVQTTQEEDGCSCRFPEEEEGGCELRVKFSRSADAPAYKQGQNQLYNELNLGRREEYDVLDKRRGRDPEMGGKPRRKNPQEGLYNELQKDKMAEAYSEIGMKGERRRGKGHDGLYQGLSTATKDTYDALHMQALPPR

SEQ ID NO: 8055 - DNA, 1182 bp, Artificial Sequence
  source: /note="Description of Artificial Sequence: Synthetic Chimeric Antigen Receptor"
atggccctccctgtcactgccctgcttctccccctcgcactcctgctccacgccgctagaccacccggatggtttctggactctccggatcgcccgtggaatcccccaaccttctcaccggcactcttggttgtgactgagggcgataatgcgaccttcacgtgctcgttctccaacacctccgaatcattcgtgctgaactggtaccgcatgagcccgtcaaaccagaccgacaagctcgccgcgtttccggaagatcggtcgcaaccgggacaggattgtcggttccgcgtgactcaactgccgaatggcagagacttccacatgagcgtggtccgcgctaggcgaaacgactccgggacctacctgtgcggagccatctcgctggcgcctaaggcccaaatcaaagagagcttgagggccgaactgagagtgaccgagcgcagagctgaggtgccaactgcacatccatccccatcgcctcggcctgcggggcagtttcagaccctggtcacgaccactccggcgccgcgcccaccgactccggccccaactatcgcgagccagcccctgtcgctgaggccggaagcatgccgccctgccgccggaggtgctgtgcatacccggggattggacttcgcatgcgacatctacatttgggctcctctcgccggaacttgtggcgtgctccttctgtccctggtcatcaccctgtactgcaagcggggtcggaaaaagcttctgtacattttcaagcagcccttcatgaggcccgtgcaaaccacccaggaggaggacggttgctcctgccggttccccgaagaggaagaaggaggttgcgagctgcgcgtgaagttctcccggagcgccgacgcccccgcctataagcagggccagaaccagctgtacaacgaactgaacctgggacggcgggaagagtacgatgtgctggacaagcggcgcggccgggaccccgaaatgggcgggaagcctagaagaaagaaccctcaggaaggcctgtataacgagctgcagaaggacaagatggccgaggcctactccgaaattgggatgaagggagagcggcggaggggaaaggggcacgacggcctgtaccaaggactgtccaccgccaccaaggacacatacgatgccctgcacatgcaggcccttccccctcgc

SEQ ID NO: 8056 - protein, 394 aa, Artificial Sequence
  source: /note="Description of Artificial Sequence: Synthetic Chimeric Antigen Receptor"
MALPVTALLLPLALLLHAARPPGWFLDSPDRPWNPPTFSPALLVVTEGDNATFTCSFSNTSESFVLNWYRMSPSNQTDKLAAFPEDRSQPGQDCRFRVTQLPNGRDFHMSVVRARRNDSGTYLCGAISLAPKAQIKESLRAEIRVTERRAEVPTAHPSPSPRPAGQFQTLVTTTPAPRPPTPAPTIASQPLSLRPEACRPAAGGAVHTRGLDFACDIYIWAPLAGTCGVLIISLVITLYCKRGRKKLLYIFKQPFMRPVQTTQEEDGCSCRFPEEEEGGCELRVKFSRSADAPAYKQGQNQLYNELNLGRREEYDVLDKRRGRDPEMGGKPRRKNPQEGLYNELQKDKMAEAYSEIGMKGERRRGKGHDGLYQGLSTATKDTYDALHMQALPPR

SEQ ID NO: 8057 - protein, 373 aa, Artificial Sequence; identical to SEQ ID NO: 8020
  source: /note="Description of Artificial Sequence: Synthetic Chimeric Antigen Receptor"

SEQ ID NO: 8058 - protein, 367 aa, Artificial Sequence
  source: /note="Description of Artificial Sequence: Synthetic Chimeric Antigen Receptor"
MALPVTALLLPLALLLHAARPPGWFLDSPDRPWNPPTFSPALLVVTEGDNATFTCSFSNTSESFVLNWYRMSPSNQTDKLAAFPEDRSQPGQDCRFRVTQLPNGRDFHMSVVRARRNDSGTYLCGAISLAPKAQIKESLRAELRVTERRAEVPTAHPSPSPRPAGQFQTLVTTTPAPRPPTPAPTIASQPLSLRPEACRPAAGGAVHTRGLDFACDIYIWAPLAGTCGVLLLSLVITLYCKRGRKKLLGGGGSGGGGSGVQVETISPGDGRTFPKRGQTCVVHYTGMLEDGKKFDSSRDRNKPFKFMLGKQEVIRGWEEGVAQMSVGQRAKLTISPDYAYGATGHPGIIPPHATLVFDVELLKLETS

SEQ ID NO: 8059 - protein, 356 aa, Artificial Sequence
  source: /note="Description of Artificial Sequence: Synthetic Chimeric Antigen Receptor"
MALPVTALLLPLALLLHAARPPGWFLDSPDRPWNPPTFSPALLVVTEGDNATFTCSFSNTSESFVLNWYRMSPSNQTDKLAAFPEDRSQPGQDCRFRVTQLPNGRDFHMSVVRARRNDSGTYLCGAISLAPKAQIKESLRAELRVTERRAEVPTARPSPSPRPAGQFQTLVTTTPAPRPPTPAPTIASQPLSLRPEACRPAAGGAVHTRGLDFACDIYIWAPLAGTCGVLLLSLVITLYCKRGRKKLLGGGGSGGGGSASRILWHEMWHEGLEEASRLYFGERNVKGMFEVLEPLHAMMERGPQTLKETSFNQAYGRDLMEAQEWCRKYMKSGNVKDLLQAWDLYYHVFRRISKTS

SEQ ID NO: 8060 - protein, 356 aa, Artificial Sequence
  source: /note="Description of Artificial Sequence: Synthetic Chimeric Antigen Receptor"
MALPVTALLLPLALLLHAARPPGWFLDSPDRPWNPPTFSPALLVVTEGDNATFTCSFSNTSESFVLNWYRMSPSNQTDKLAAFPEDRSQPGQDCRFRVTQLPNGRDFHMSVVRARRNDSGTYLCGAISLAPKAQIKESLRAELRVTERRAEVPTAHPSPSPRPAGQFQTLVTTTPAPRPPTPAPTIASQPLSLRPEACRPAAGGAVHTRGLDFACDIYIWAPLAGTCGVLLLSLVITLYCKRGRKKLLGGGGSGGGGSASRILWHEMWHEGLEEASRLYFGERNVKGMFEVLEPLHAMMERGPQTLKETSFNQAYGRDLMEAQEWCRKYMKSGNVKDLLQAWDLYYHVFRRISKTS

SEQ ID NO: 8061 - protein, 425 aa, Artificial Sequence
  source: /note="Description of Artificial Sequence: Synthetic Chimeric Antigen Receptor"
MALPVTALLLPLALLLHAARPGSGSGAQAAEVQLQQSGPELVKPGTSVRISCKTSGYTFTEYTIHWVKQSHGKSLEWIGNINPNNGGTTYNQKFEDKATLTVDKSSSTAYMELRSLTSEDSAVYYCAAGWNFDYWGQGTTVTVSSGGGGSGGGGSGGGGSDIVMTQSHKFMSTSVGDRVSIICKASQDVGTAVDWYQQKPGQSPKLLIYWASTRHTGVPDRFTGSGSGTDFTLTITNVQSEDLADYFCQQYNSYPLTFGAGTMLDLKRAAARSDPASGAGSGSGSALNVTYVPQNPTTGIFPGDGSGKQETRAGVVHGAIGGAGVTALLALCLCLIFFIVKTHRRKAARTAVGRNDTHPTTGSASPKHQKKSKLHGPTETSSCSGAAPTVEMDEELHYASLNFHGMNPSKDTSTEYSEVRTQSHG

SEQ ID NO: 8062 - protein, 386 aa, Artificial Sequence
  source: /note="Description of Artificial Sequence: Synthetic Chimeric Antigen Receptor"
MALPVTALLLPLALLLHAARPGSGSGAQAAEVQLQQSGPELVKPGTSVRISCKTSGYTFTEYTIHWVKQSHGKSLEWIGNINPNNGGTTYNQKFEDKATLTVDKSSSTAYMELRSLTSEDSAVYYCAAGWNFDYWGQGTTVTVSSGGGGSGGGGSGGGGSDIVMTQSHKFMSTSVGDRVSIICKASQDVGTAVDWYQQKPGQSPKLLIYWASTRHTGVPDRFTGSGSGTDFTLTITNVQSEDLADYFCQQYNSYPLTFGAGTMLDLKRAAARSDPASGAGSGSGSAVQAPSSSPMGIIVAVVTGIAVAAIVAAVVALIYCRKKRISALPGYPECREMGETLPEKPANPTNPDEADKVGAENTITYSLLMHPDALEEPDDQNRISHG

SEQ ID NO: 8063 - protein, 427 aa, Artificial Sequence
  source: /note="Description of Artificial Sequence: Synthetic Chimeric Antigen Receptor"
MALPVTALLLPLALLLHAARPGSGSGAQAAEVQLQQSGPELVKPGTSVRISCKTSGYTFTEYTIHWVKQSHGKSLEWIGNINPNNGGTTYNQKFEDKATLTVDKSSSTAYMELRSLTSEDSAVYYCAAGWNFDYWGQGTTVTVSSGGGGSGGGGSGGGGSDIVMTQSHKFMSTSVGDRVSIICKASQDVGTAVDWYQQKPGQSPKLLIYWASTRHTGVPDRFTGSGSGTDFTLTITNVQSEDLADYFCQQYNSYPLTFGAGTMLDLKRAAARSDPASGAGSGSGSALNFTVPTGARSNHLTSGVIEGLLSTLGPATVALLFCYGLKRKIGRRSARDPLRSLPSPLPQEFTYLNSPTPGQLQPIYENVNVVSGDEVYSLAYYNQPEQESVAAETLGTHMEDKVSLDIYSRLRKANITDVDYEDAMSHG

SEQ ID NO: 8064 - protein, 410 aa, Artificial Sequence
  source: /note="Description of Artificial Sequence: Synthetic Chimeric Antigen Receptor"
MALPVTALLLPLALLLHAARPGSGSGAQAAEVQLQQSGPELVKPGTSVRISCKTSGYTFTEYTIHWVKQSHGKSLEWIGNINPNNGGTTYNQKFEDKATLTVDKSSSTAYMELRSLTSEDSAVYYCAAGWNFDYWGQGTTVTVSSGGGGSGGGGSGGGGSDIVMTQSHKFMSTSVGDRVSIICKASQDVGTAVDWYQQKPGQSPKLLIYWASTRHTGVPDRFTGSGSGTDFTLTITNVQSEDLADYFCQQYNSYPLTFGAGTMLDLKRAAARSDPASGAGSGSGSAGPDGYRRDLMTAGVLWGLFGVLGFTGVALLLYALFHKISGESSATNEPRGASRPNPQEFTYSSPTPDMEELQPVYVNVGSVDVDVVYSQVWSMQQPESSANIRTLLENKDSQVIYSSVKKSSHG

SEQ ID NO: 8065 - protein, 460 aa, Artificial Sequence
  source: /note="Description of Artificial Sequence: Synthetic Chimeric Antigen Receptor"
MALPVTALLLPLALLLHAARPGSGSGAQAAEVQLQQSGPELVKPGTSVRISCKTSGYTFTEYTIHWVKQSHGKSLEWIGNINPNNGGTTYNQKFEDKATLTVDKSSSTAYMELRSLTSEDSAVYYCAAGWNFDYWGQGTTVTVSSGGGGSGGGGSGGGGSDIVMTQSHKFMSTSVGDRVSIICKASQDVGTAVDWYQQKPGQSPKLLIYWASTRHTGVPDRFTGSGSGTDFTLTITNVQSEDLADYFCQQYNSYPLTFGAGTMLDLKRAAARSDPASGAGSGSGSAGTSRNRTGLTAAGITGLVLSILVLAAAAALLHYARARRKPGGLSATGTSSHSPSECQEPSSSRPSRIDPQEPTHSKPLAPMELEPMYSNANPGDSNPIYSQIWSIQHTKENSANCPMMHQEHEELTVLYSELKKTHPDDSAGEASSRGRAHEEDDEENYENVPRVLLASDHSHG

SEQ ID NO: 8066 - protein, 430 aa, Artificial Sequence
  source: /note="Description of Artificial Sequence: Synthetic Chimeric Antigen Receptor"
MALPVTALLLPLALLLHAARPGSGSGAQAAEVQLQQSGPELVKPGTSVRISCKTSGYTFTEYTIHWVKQSHGKSLEWIGNINPNNGGTTYNQKFEDKATLTVDKSSSTAYMELRSLTSEDSAVYYCAAGWNFDYWGQGTTVTVSSGGGGSGGGGSGGGGSDIVMTQSHKFMSTSVGDRVSIICKASQDVGTAVDWYQQKPGQSPKLLIYWASTRHTGVPDRFTGSGSGTDFTLTITNVQSEDLADYFCQQYNSYPLTFGAGTMLDLKRAAARSDPASGAGSGSGSAVTVRETPGNRDGLVAAGATGGLLSALLLAVALLFHCWRRRKSGVGFLGDETRLPPAPGPGESSHSICPAQVELQSLYVDVHPKKGDLVYSEIQTTQLGEEEEANTSRTLLEDKDVSVVYSEVKTQHPDNSAGKISSKDEESSHG

SEQ ID NO: 8067 - protein, 432 aa, Artificial Sequence
  source: /note="Description of Artificial Sequence: Synthetic Chimeric Antigen Receptor"
MALPVTALLLPLALLLHAARPGSGSGAQAAEVQLQQSGPELVKPGTSVRISCKTSGYTFTEYTIHWVKQSHGKSLEWIGNINPNNGGTTYNQKFEDKATLTVDKSSSTAYMELRSLTSEDSAVYYCAAGWNFDYWGQGTTVTVSSGGGGSGGGGSGGGGSDIVMTQSHKFMSTSVGDRVSIICKASQDVGTAVDWYQQKPGQSPKLLIYWASTRHTGVPDRFTGSGSGTDFTLTITNVQSEDLADYFCQQYNSYPLTFGAGTMLDLKRAAARSDPASGAGSGSGSALYITGLTANRSGPFATGVAGGLLSIAGLAAGALLLYCWLSRKAGRKPASDPARSPPDSDSQEPTYHNVPAWEELQPVYTNANPRGENVVYSEVRIIQEKKKHAVASDPRHLRNKGSPIIYSEVKVASTPVSGSLFLASSAPHRSHG

SEQ ID NO: 8068 - protein, 432 aa, Artificial Sequence
  source: /note="Description of Artificial Sequence: Synthetic Chimeric Antigen Receptor"
MALPVTALLLPLALLLHAARPGSGSGAQAAEVQLQQSGPELVKPGTSVRISCKTSGYTFTEYTIHWVKQSHGKSLEWIGNINPNNGGTTYNQKFEDKATLTVDKSSSTAYMELRSLTSEDSAVYYCAAGWNFDYWGQGTTVTVSSGGGGSGGGGSGGGGSDIVMTQSHKFMSTSVGDRVSIICKASQDVGTAVDWYQQKPGQSPKLLIYWASTRHTGVPDRFTGSGSGTDFTLTITNVQSEDLADYFCQQYNSYPLTFGAGTMLDLKRAAARSDPASGAGSGSGSAPYEWSKSSDPLLVSVTGNPSNSWPSPTEPSSKTGNPRHLHILIGTSVVIILFILLFFLLHRWCSNKKNAAVMDQESAGNRTANSEDSDEQDPQEVTYTQLNHCVFTQRKITRPSQRPKTPPTDIIVYTELPNAESRSKVVSCPSHG

SEQ ID NO: 8069 - protein, 432 aa, Artificial Sequence
  source: /note="Description of Artificial Sequence: Synthetic Chimeric Antigen Receptor"
MALPVTALLLPLALLLHAARPGSGSGAQAAEVQLQQSGPELVKPGTSVRISCKTSGYTFTEYTIHWVKQSHGKSLEWIGNINPNNGGTTYNQKFEDKATLTVDKSSSTAYMELRSLTSEDSAVYYCAAGWNFDYWGQGTTVTVSSGGGGSGGGGSGGGGSDIVMTQSHKFMSTSVGDRVSIICKASQDVGTAVDWYQQKPGQSPKLLIYWASTRHTGVPDRFTGSGSGTDFTLTITNVQSEDLADYFCQQYNSYPLTFGAGTMLDLKRAAARSDPASGAGSGSGSAPYEWSNSSDPLLVSVIGNPSNSWPSPTEPSSKTGNPRHLHILIGTSVVIILFILLFFLLHRWCSNKKNAAVMDQESAGNRTANSEDSDEQDPQEVTYTQLNHCVFTQRKITRPSQRPKTPPTDIIVYAELPNAESRSKVVSCPSHG

SEQ ID NO: 8070 - protein, 425 aa, Artificial Sequence
  source: /note="Description of Artificial Sequence: Synthetic Chimeric Antigen Receptor"
MALPVTALLLPLALLLHAARPGSGSGAQAAEVQLQQSGPELVKPGTSVRISCKTSGYTFTEYTIHWVKQSHGKSLEWIGNINPNNGGTTYNQKFEDKATLTVDKSSSTAYMELRSLTSEDSAVYYCAAGWNFDYWGQGTTVTVSSGGGGSGGGGSGGGGSDIVMTQSHKFMSTSVGDRVSIICKASQDVGTAVDWYQQKPGQSPKLLIYWASTRHTGVPDRFTGSGSGTDFTLTITNVQSEDLADYFCQQYNSYPLTFGAGTMLDLKRAAARSDPASGAGSGSGSAPYEWSNSSDPLLVSVTGNPSNSWPSPTEPSSETGNPRHLHVLIGTSVVIILFILLLFFLLHRWCCNKKNAVVMDQEPAGNRTVNREDSDEQDPQEVTYAQLNHCVFTQRKITRPSQRPKTPPTDIIVYTELPNAEPSHG

SEQ ID NO: 8071 - protein, 464 aa, Artificial Sequence
  source: /note="Description of Artificial Sequence: Synthetic Chimeric Antigen Receptor"
MALPVTALLLPLALLLHAARPGSGSGAQAAEVQLQQSGPELVKPGTSVRISCKTSGYTFTEYTIHWVKQSHGKSLEWIGNINPNNGGTTYNQKFEDKATLTVDKSSSTAYMELRSLTSEDSAVYYCAAGWNFDYWGQGTTVTVSSGGGGSGGGGSGGGGSDIVMTQSHKFMSTSVGDRVSIICKASQDVGTAVDWYQQKPGQSPKLLIYWASTRHTGVPDRFTGSGSGTDFTLTITNVQSEDLADYFCQQYNSYPLTFGAGTMLDLKRAAARSDPASGAGSGSGSAPYEWSDASDPLPVSVTGNPSSSWPSPTEPSFKTGIARHLHAVIRYSVAIILFTILPFFLLHRWCSKKKDAAVMNQEPAGHRTVNREDSDEQDPQEVTYAQLDHCIFTQRKITGPSQRSKRPSTDTSVCIELPNAEPRALSPAHEHHSQALMGSSRETTALSQTQLASSHVPAAGISHG

SEQ ID NO: 8072 - protein, 464 aa, Artificial Sequence
  source: /note="Description of Artificial Sequence: Synthetic Chimeric Antigen Receptor"
MALPVTALLLPLALLLHAARPGSGSGAQAAEVQLQQSGPELVKPGTSVRISCKTSGYTFTEYTIHWVKQSHGKSLEWIGNINPNNGGTTYNQKFEDKATLTVDKSSSTAYMELRSLTSEDSAVYYCAAGWNFDYWGQGTTVTVSSGGGGSGGGGSGGGGSDIVMTQSHKFMSTSVGDRVSIICKASQDVGTAVDWYQQKPGQSPKLLIYWASTRHTGVPDRFTGSGSGTDFTLTITNVQSEDLADYFCQQYNSYPLTFGAGTMLDLKRAAARSDPASGAGSGSGSAPYEWSDPSDPLLVSVTGNSSSSSSSPTEPSSKTGIRRHLHILIGTSVAIILFIILFFFLLHCCCSNKKNAAVMDQEPAGDRTVNREDSDDQDPQEVTYAQLDHCVFTQTKITSPSQRPKTPPTDTTMYMELPNAKPRSLSPAHKHHSQALRGSSRETTALSQNRVASSHVPAAGISHG

SEQ ID NO: 8073 - protein, 433 aa, Artificial Sequence
  source: /note="Description of Artificial Sequence: Synthetic Chimeric Antigen Receptor"
MALPVTALLLPLALLLHAARPGSGSGAQAAEVQLQQSGPELVKPGTSVRISCKTSGYTFTEYTIHWVKQSHGKSLEWIGNINPNNGGTTYNQKFEDKATLTVDKSSSTAYMELRSLTSEDSAVYYCAAGWNFDYWGQGTTVTVSSGGGGSGGGGSGGGGSDIVMTQSHKFMSTSVGDRVSIICKASQDVGTAVDWYQQKPGQSPKLLIYWASTRHTGVPDRFTGSGSGTDFTLTITNVQSEDLADYFCQQYNSYPLTFGAGTMLDLKRAAARSDPASGAGSGSGSAPYEWSDPSDPLLVSVTGNPSSSWPSPTEPSSKSGNPRHLHILIGTSVVIILFILLLFFLLHLWCSNKKNAAVMDQEPAGNRTANSEDSDEQDPEEVTYAQLDHCVFTQRKITRPSQRPKTPPTDTILYTELPNAKPRSKVVSCPSHG

SEQ ID NO: 8074 - protein, 444 aa, Artificial Sequence
  source: /note="Description of Artificial Sequence: Synthetic Chimeric Antigen Receptor"
MALPVTALLLPLALLLHAARPGSGSGAQAAEVQLQQSGPELVKPGTSVRISCKTSGYTFTEYTIHWVKQSHGKSLEWIGNINPNNGGTTYNQKFEDKATLTVDKSSSTAYMELRSLTSEDSAVYYCAAGWNFDYWGQGTTVTVSSGGGGSGGGGSGGGGSDIVMTQSHKFMSTSVGDRVSIICKASQDVGTAVDWYQQKPGQSPKLLIYWASTRHTGVPDRFTGSGSGTDFTLTITNVQSEDLADYFCQQYNSYPLTFGAGTMLDLKRAAARSDPASGAGSGSGSAPCVWSNSSDPLLVSVTGNPSSSWPSPTEPSSKSGICRHLHVLIGTSVVIFLFILLLFFLLYRWCSNKKNAAVMDQEPAGDRTVNRQDSDEQDPQEVTYAQLDHCVFIQRKISRPSQRPKTPLTDTSVYTELPNAEPRSKVVSCPRAPQSGLEGVFSHG

SEQ ID NO: 8075 - protein, 404 aa, Artificial Sequence
  source: /note="Description of Artificial Sequence: Synthetic Chimeric Antigen Receptor"
MALPVTALLLPLALLLHAARPGSGSGAQAAEVQLQQSGPELVKPGTSVRISCKTSGYTFTEYTIHWVKQSHGKSLEWIGNINPNNGGTTYNQKFEDKATLTVDKSSSTAYMELRSLTSEDSAVYYCAAGWNFDYWGQGTTVTVSSGGGGSGGGGSGGGGSDIVMTQSHKFMSTSVGDRVSIICKASQDVGTAVDWYQQKPGQSPKLLIYWASTRHTGVPDRFTGSGSGTDFTLTITNVQSEDLADYFCQQYNSYPLTFGAGTMLDLKRAAARSDPASGAGSGSGSASFRALPHAWSDPSDPLPVSVTGNSRYLHALIGTSVVIIPFAILLFFLLHRWCANKKNAVVMDQEPAGNRTVNREDSDEQDPQEVTYAQLNHCVFTQRKITRPSQRPKTPPTDTSVSHG

SEQ ID NO: 8076 - protein, 468 aa, Artificial Sequence
  source: /note="Description of Artificial Sequence: Synthetic Chimeric Antigen Receptor"
MALPVTALLLPLALLLHAARPGSGSGAQAAEVQLQQSGPELVKPGTSVRISCKTSGYTFTEYTIHWVKQSHGKSLEWIGNINPNNGGTTYNQKFEDKATLTVDKSSSTAYMELRSLTSEDSAVYYCAAGWNFDYWGQGTTVTVSSGGGGSGGGGSGGGGSDIVMTQSHKFMSTSVGDRVSIICKASQDVGTAVDWYQQKPGQSPKLLIYWASTRHTGVPDRFTGSGSGTDFTLTITNVQSEDLADYFCQQYNSYPLTFGAGTMLDLKRAAARSDPASGAGSGSGSAGPSMGSSPPPTGPISTPAGPEDQPLTPTGSDPQSGLGRHLGVVIGILVAVVLLLLLLLLLFLILRHRRQGKHWTSTQRKADFQHPAGAVGPEPTDRGLQWRSSPAADAQEENLYAAVKDTQPEDGVEMDTRAAASEAPQDVTYAQLHSLTLRRKATEPPPSQEREPPAEPSIYATLAIHSHG

SEQ ID NO: 8077 - protein, 501 aa, Artificial Sequence
  source: /note="Description of Artificial Sequence: Synthetic Chimeric Antigen Receptor"
MALPVTALLLPLALLLHAARPGSGSGAQAAEVQLQQSGPELVKPGTSVRISCKTSGYTFTEYTIHWVKQSHGKSLEWIGNINPNNGGTTYNQKFEDKATLTVDKSSSTAYMELRSLTSEDSAVYYCAAGWNFDYWGQGTTVTVSSGGGGSGGGGSGGGGSDIVMTQSHKFMSTSVGDRVSIICKASQDVGTAVDWYQQKPGQSPKLLIYWASTRHTGVPDRFTGSGSGTDFTLTITNVQSEDLADYFCQQYNSYPLTFGAGTMLDLKRAAARSDPASGAGSGSGSAGHSGGSSLPPTGPPSTPGLGRYLEVLIGVSVAFVLLLFLLLFLLLRRQRHSKHRTSDQRKTDFQRPAGAAETEPKDRGLLRRSSPAADVQEENLYAAVKDTQSEDRVELDSQSPHDEDPQAVTYAPVKHSSPRREMASPPSSLSGEFLDTKDRQVEEDRQMDTEAAASEASQDVTYAQLHSLTLRRKATEPPPSQEGEPPAEPSIYATLAIHSHG

SEQ ID NO: 8078 - protein, 519 aa, Artificial Sequence
  source: /note="Description of Artificial Sequence: Synthetic Chimeric Antigen Receptor"
MALPVTALLLPLALLLHAARPGSGSGAQAAEVQLQQSGPELVKPGTSVRISCKTSGYTFTEYTIHWVKQSHGKSLEWIGNINPNNGGTTYNQKFEDKATLTVDKSSSTAYMELRSLTSEDSAVYYCAAGWNFDYWGQGTTVTVSSGGGGSGGGGSGGGGSDIVMTQSHKFMSTSVGDRVSIICKASQDVGTAVDWYQQKPGQSPKLLIYWASTRHTGVPDRFTGSGSGTDFTLTITNVQSEDLADYFCQQYNSYPLTFGAGTMLDLKRAAARSDPASGAGSGSGSAGSLEGPRPSPTRSVSTAAGPEDQPLMPTGSVPHSGLRRHWEVLIGVLVVSILLLSLLLFLLLQHWRQGKHRTLAQRQADFQRPPGAAEPEPKDGGLQRRSSPAADVQGENFCAAVKNTQPEDGVEMDTRQSPHDEDPQAVTYAKVKHSRPRREMASPPSPLSGEFLDTKDRQAEEDRQMDTEAAASEAPQDVTYAQLHSFTLRQKATEPPPSQEGASPAEPSVYATLAIHSHG

SEQ ID NO: 8079 - protein, 461 aa, Artificial Sequence
  source: /note="Description of Artificial Sequence: Synthetic Chimeric Antigen Receptor"
MALPVTALLLPLALLLHAARPGSGSGAQAAEVQLQQSGPELVKPGTSVRISCKTSGYTFTEYTIHWVKQSHGKSLEWIGNINPNNGGTTYNQKFEDKATLTVDKSSSTAYMELRSLTSEDSAVYYCAAGWNFDYWGQGTTVTVSSGGGGSGGGGSGGGGSDIVMTQSHKFMSTSVGDRVSIICKASQDVGTAVDWYQQKPGQSPKLLIYWASTRHTGVPDRFTGSGSGTDFTLTITNVQSEDLADYFCQQYNSYPLTFGAGTMLDLKRAAARSDPASGAGSGSGSAGPSGDPSLSPTGSTPTPGPEDQPLTPTGLDPQSGLGRHLGVVTGVSVAFVLLLFLLLFLLLRHRHQSKHRTSAHFYRPAGAAGPEPKDQGLQKRASPVADIQEEILNAAVKDTQPKDGVEMDARAAASEAPQDVTYAQLHSLTLRREATEPPPSQEREPPAEPSIYAPLAIHSHG

SEQ ID NO: 8080 - protein, 419 aa, Artificial Sequence
  source: /note="Description of Artificial Sequence: Synthetic Chimeric Antigen Receptor"
MALPVTALLLPLALLLHAARPGSGSGAQAAEVQLQQSGPELVKPGTSVRISCKTSGYTFTEYTIHWVKQSHGKSLEWIGNINPNNGGTTYNQKFEDKATLTVDKSSSTAYMELRSLTSEDSAVYYCAAGWNFDYWGQGTTVTVSSGGGGSGGGGSGGGGSDIVMTQSHKFMSTSVGDRVSIICKASQDVGTAVDWYQQKPGQSPKLLIYWASTRHTGVPDRFTGSGSGTDFTLTITNVQSEDLADYFCQQYNSYPLTFGAGTMLDLKRAAARSDPASGAGSGSGSAMPSTGGDSCPFCLKLLLPGLLLLLVVIILILAFWVLPKYKTRKAMRNNVPRDRGDTAMEVGIYANILEKQAKEESVPEVGSRPCVSTAQDEAKHSQELQYATPVFQEVAPREQEACDSYKSGYVYSELNFSHG

SEQ ID NO: 8081 - protein, 412 aa, Artificial Sequence
  source: /note="Description of Artificial Sequence: Synthetic Chimeric Antigen Receptor"
MALPVTALLLPLALLLHAARPGSGSGAQAAEVQLQQSGPELVKPGTSVRISCKTSGYTFTEYTIHWVKQSHGKSLEWIGNINPNNGGTTYNQKFEDKATLTVDKSSSTAYMELRSLTSEDSAVYYCAAGWNFDYWGQGTTVTVSSGGGGSGGGGSGGGGSDIVMTQSHKFMSTSVGDRVSIICKASQDVGTAVDWYQQKPGQSPKLLIYWASTRHTGVPDRFTGSGSGTDFTLTITNVQSEDLADYFCQQYNSYPLTFGAGTMLDLKRAAARSDPASGAGSGSGSAPGHIRLYVVEKENLPVFPVWVVVGIVTAVVLGLTLLISMILAVLYRRKNSKRDYTGCSTSESLSPVKQAPRKSPSDTEGLVKSLPSGSHQGPVIYAQLDHSGGHHSDKINKSESVVYADIRKNSHG

SEQ ID NO: 8082 - protein, 405 aa, Artificial Sequence
  source: /note="Description of Artificial Sequence: Synthetic Chimeric Antigen Receptor"
MALPVTALLLPLALLLHAEVQLQQSGPELVKPGTSVRISCKTSGYTFTEYTIHWVKQSHGKSLEWIGNINPNNGGTTYNQKFEDKATLTVDKSSSTAYMELRSLTSEDSAVYYCAAGWNFDYWGQGTTVTVSSGGGGSGGGGSGGGGSDIVMTQSHKFMSTSVGDRVSIICKASQDVGTAVDWYQQKPGQSPKLLIYWASTRHTGVPDRFTGSGSGTDFTLTITNVQSEDLADYFCQQYNSYPLTFGAGTMLDLKRAAATERRAEVPTAHPSPSPRPAGQFQTLVVGVVGGLLGSLVLLVWVLAVICSRAARGTIGARRTGQPLKEDPSAVPVFSVDYGELDFQWREKTPEPPVPCVPEQTEYATIVFPSGMGTSSPARRGSADGPRSAQPLRPEDGHCSWPLSH

SEQ ID NO: 8083 - protein, 432 aa, Artificial Sequence
  source: /note="Description of Artificial Sequence: Synthetic Chimeric Antigen Receptor"
MALPVTALLLPLALLLHAARPGSGSGAQAAEVQLQQSGPELVKPGTSVRISCKTSGYTFTEYTIHWVKQSHGKSLEWIGNINPNNGGTTYNQKFEDKATLTVDKSSSTAYMELRSLTSEDSAVYYCAAGWNFDYWGQGTTVTVSSGGGGSGGGGSGGGGSDIVMTQSHKFMSTSVGDRVSIICKASQDVGTAVDWYQQKPGQSPKLLIYWASTRHTGVPDRFTGSGSGTDFTLTITNVQSEDLADYFCQQYNSYPLTFGAGTMLDLKRAAARSDPASGAGSGSGSAERRAEVPTAHPSPSPRPAGQFQTLVVGVVGGLLGSLVLLVWVLAVICSRAARGTIGARRTGQPLKEDPSAVPVFSVDYGELDFQWREKTPEPPVPCVPEQTEYATIVFPSGMGTSSPARRGSADGPRSAQPLRPEDGHCSWPLSHG

SEQ ID NO: 8084 - protein, 436 aa, Artificial Sequence
  source: /note="Description of Artificial Sequence: Synthetic Chimeric Antigen Receptor"
MALPVTALLLPLALLLHAARPGSGSGAQAAEVQLQQSGPELVKPGTSVRISCKTSGYTFTEYTIHWVKQSHGKSLEWIGNINPNNGGTTYNQKFEDKATLTVDKSSSTAYMELRSLTSEDSAVYYCAAGWNFDYWGQGTTVTVSSGGGGSGGGGSGGGGSDIVMTQSHKFMSTSVGDRVSIICKASQDVGTAVDWYQQKPGQSPKLLIYWASTRHTGVPDRFTGSGSGTDFTLTITNVQSEDLADYFCQQYNSYPLTFGAGTMLDLKRAAARSDPASGAGSGSGSAVRVILAPWKKGLIAVVIIGVIIALLIIAAKCYFLRKAKAKQMPVEMSRPAVPLLNSNNEKMSDPNMEANSHYGHNDDVGNHAMKPINDNKEPLNSDVQYTEVQVSSAESHKDLGKKDTETVYSEVRKAVPDAVESRYSRTEGSLDGTSHG

SEQ ID NO: 8085 - protein, 442 aa, Artificial Sequence
  source: /note="Description of Artificial Sequence: Synthetic Chimeric Antigen Receptor"
MALPVTALLLPLALLLHAARPGSGSGAQAAEVQLQQSGPELVKPGTSVRISCKTSGYTFTEYTIHWVKQSHGKSLEWIGNINPNNGGTTYNQKFEDKATLTVDKSSSTAYMELRSLTSEDSAVYYCAAGWNFDYWGQGTTVTVSSGGGGSGGGGSGGGGSDIVMTQSHKFMSTSVGDRVSIICKASQDVGTAVDWYQQKPGQSPKLLIYWASTRHTGVPDRFTGSGSGTDFTLTITNVQSEDLADYFCQQYNSYPLTFGAGTMLDLKRAAARSDPASGAGSGSGSAQAVTTTTQRPSSMTTTWRLSSTTTTTGLRVTQGKRRSDSWHISLETAVGVAVAVTVLGIMILGLICLLRWRRRKGQQRTKATTPAREPFQNTEEPYENIRNEGQNTDPKLNPKDDGIVYASLALSSSTSPKAPPSHRPLKSPQNETLYSVLKASHG

SEQ ID NO: 8086 - protein, 378 aa, Artificial Sequence
  source: /note="Description of Artificial Sequence: Synthetic Chimeric Antigen Receptor"
MALPVTALLLPLALLLHAARPGSGSGAQAAEVQLQQSGPELVKPGTSVRISCKTSGYTFTEYTIHWVKQSHGKSLEWIGNINPNNGGTTYNQKFEDKATLTVDKSSSTAYMELRSLTSEDSAVYYCAAGWNFDYWGQGTTVTVSSGGGGSGGGGSGGGGSDIVMTQSHKFMSTSVGDRVSIICKASQDVGTAVDWYQQKPGQSPKLLIYWASTRHTGVPDRFTGSGSGTDFTLTITNVQSEDLADYFCQQYNSYPLTFGAGTMLDLKRAAARSDPASGAGSGSGSAVKEGPPSEHSGISRNAIIFLVLGILVFLILLGIGIYFYWSKCSREVLWHCHLCPSSTEHASASANGHVSYSAVSRENSSSQDPQTEGTRSHG

SEQ ID NO: 8087 - protein, 545 aa, Artificial Sequence
  source: /note="Description of Artificial Sequence: Synthetic Chimeric Antigen Receptor"
MALPVTALLLPLALLLHAARPGSGSGAQAAEVQLQQSGPELVKPGTSVRISCKTSGYTFTEYTIHWVKQSHGKSLEWIGNINPNNGGTTYNQKFEDKATLTVDKSSSTAYMELRSLTSEDSAVYYCAAGWNFDYWGQGTTVTVSSGGGGSGGGGSGGGGSDIVMTQSHKFMSTSVGDRVSIICKASQDVGTAVDWYQQKPGQSPKLLIYWASTRHTGVPDRFTGSGSGTDFTLTITNVQSEDLADYFCQQYNSYPLTFGAGTMLDLKRAAARSDPASGAGSGSGSAVHYSPKLLGPSCSWEAEGLHCSCSSQASPAPSLRWWLGEELLEGNSSQDSFEVTPSSAGPWANSSLSLHGGLSSGLRLRCEAWNVHGAQSGSILQLPDKKGLISTAFSNGAFLGIGITALLFLCLALIIMKILPKRRTQTETPRPRFSRHSTILDYINVVPTAGPLAQKRNQKATPNSPRTPLPPGAPSPESKKNQKKQYQLPSFPEPKSSTQAPESQESQEELHYATLNFPGVRPRPEARMPKGTQADYAEVKFQSHG

SEQ ID NO: 8088 - protein, 535 aa, Artificial Sequence
  source: /note="Description of Artificial Sequence: Synthetic Chimeric Antigen Receptor"
MALPVTALLLPLALLLHAARPGSGSGAQAAEVQLQQSGPELVKPGTSVRISCKTSGYTFTEYTIHWVKQSHGKSLEWIGNINPNNGGTTYNQKFEDKATLTVDKSSSTAYMELRSLTSEDSAVYYCAAGWNFDYWGQGTTVTVSSGGGGSGGGGSGGGGSDIVMTQSHKFMSTSVGDRVSIICKASQDVGTAVDWYQQKPGQSPKLLIYWASTRHTGVPDRFTGSGSGTDFTLTITNVQSEDLADYFCQQYNSYPLTFGAGTMLDLKRAAARSDPASGAGSGSGSAVHYPPQLLGPSCSWEAEGLHCSCSSQASPAPSLRWWLGEELLEGNSSQGSFEVTPSSAGPWANSSLSLHGGLSSGLRLRCKAWNVHGAQSGSVFQLLPGKLEHGGGLGLGAALGAGVAALLAFCSCLVVFRVKICRKEARKRAAAEQDVPSTLGPISQGHQHECSAGSSQDHPPPGAATYTPGKGEEQELHYASLSFQGLRLWEPADQEAPSTTEYSEIKIHTGQPLRGPGFGLQLEREMSGMVPKSHG

SEQ ID NO: 8089 - protein, 422 aa, Artificial Sequence
  source: /note="Description of Artificial Sequence: Synthetic Chimeric Antigen Receptor"
MALPVTALLLPLALLLHAARPGSGSGAQAAEVQLQQSGPELVKPGTSVRISCKTSGYTFTEYTIHWVKQSHGKSLEWIGNINPNNGGTTYNQKFEDKATLTVDKSSSTAYMELRSLTSEDSAVYYCAAGWNFDYWGQGTTVTVSSGGGGSGGGGSGGGGSDIVMTQSHKFMSTSVGDRVSIICKASQDVGTAVDWYQQKPGQSPKLLIYWASTRHTGVPDRFTGSGSGTDFTLTITNVQSEDLADYFCQQYNSYPLTFGAGTMLDLKRAAARSDPASGAGSGSGSALQNEYTGKMRPISGVTLGAFGGAGATALVFLYFCIIFVVVRSCRKKSARPAVGVGDTGMEDANAVRGSASQGPLIESPADDSPPHHAPPALATPSPEEGEIQYASLSFHKARPQYPQEQEAIGYEYSEINIPKSHG

SEQ ID NO: 8090 - protein, 510 aa, Artificial Sequence
  source: /note="Description of Artificial Sequence: Synthetic Chimeric Antigen Receptor"
MALPVTALLLPLALLLHAARPGSGSGAQAAEVQLQQSGPELVKPGTSVRISCKTSGYTFTEYTIHWVKQSHGKSLEWIGNINPNNGGTTYNQKFEDKATLTVDKSSSTAYMELRSLTSEDSAVYYCAAGWNFDYWGQGTTVTVSSGGGGSGGGGSGGGGSDIVMTQSHKFMSTSVGDRVSIICKASQDVGTAVDWYQQKPGQSPKLLIYWASTRHTGVPDRFTGSGSGTDFTLTITNVQSEDLADYFCQQYNSYPLTFGAGTMLDLKRAAARSDPASGAGSGSGSAVYSLPQLLGPSCSWEAEGLHCRCSFRAWPAPSLCWRLEEKPLEGNSSQGSFKVNSSSPGPWANSSLILHGGLNSDLKVSCKAWNIYGSQSGSVLLLQGRSNLGTGVVPAALGGAGVMALLCICLCLIFFLIVKARRKQAAGRPEKMDDEDPIMGTITSGSRKKPWPDSPGDQASPPGDAPPLEEQKELHYASLSFSEMKSREPKDQEAPSTTEYSEIKTSKSHG

SEQ ID NO: 8091 - protein, 409 aa, Artificial Sequence
  source: /note="Description of Artificial Sequence: Synthetic Chimeric Antigen Receptor"
MALPVTALLLPLALLLHAARPGSGSGAQAAEVQLQQSGPELVKPGTSVRISCKTSGYTFTEYTIHWVKQSHGKSLEWIGNINPNNGGTTYNQKFEDKATLTVDKSSSTAYMELRSLTSEDSAVYYCAAGWNFDYWGQGTTVTVSSGGGGSGGGGSGGGGSDIVMTQSHKFMSTSVGDRVSIICKASQDVGTAVDWYQQKPGQSPKLLIYWASTRHTGVPDRFTGSGSGTDFTLTITNVQSEDLADYFCQQYNSYPLTFGAGTMLDLKRAAARSDPASGAGSGSGSALFVHWKPEGRAGGVLGAVWGASITTLVFLCVCFIFRVKTRRKKAAQPVQNTDDVNPVMVSGSRGHQHQFQTGIVSDHPAEAGPISEDEQELHYAVLHFHKVQPQEPKVTDTEYSEIKIHKSHG

SEQ ID NO: 8092 - protein, 420 aa, Artificial Sequence
  source: /note="Description of Artificial Sequence: Synthetic Chimeric Antigen Receptor"
MALPVTALLLPLALLLHAARPGSGSGAQAAEVQLQQSGPELVKPGTSVRISCKTSGYTFTEYTIHWVKQSHGKSLEWIGNINPNNGGTTYNQKFEDKATLTVDKSSSTAYMELRSLTSEDSAVYYCAAGWNFDYWGQGTTVTVSSGGGGSGGGGSGGGGSDIVMTQSHKFMSTSVGDRVSIICKASQDVGTAVDWYQQKPGQSPKLLIYWASTRHTGVPDRFTGSGSGTDFTLTITNVQSEDLADYFCQQYNSYPLTFGAGTMLDLKRAAARSDPASGAGSGSGSALQQEYTGKMRPVSGVLLGAVGGAGATALVFLSFCVIFIVVRSCRKKSARPAADVGDIGMKDANTIRGSASQGNLTESWADDNPRHHGLAAHSSGEEREIQYAPLSFHKGEPQDLSGQEATNNEYSEIKIPKSHG

SEQ ID NO: 8093 - protein, 444 aa, Artificial Sequence
  source: /note="Description of Artificial Sequence: Synthetic Chimeric Antigen Receptor"
MALPVTALLLPLALLLHAARPGSGSGAQAAEVQLQQSGPELVKPGTSVRISCKTSGYTFTEYTIHWVKQSHGKSLEWIGNINPNNGGTTYNQKFEDKATLTVDKSSSTAYMELRSLTSEDSAVYYCAAGWNFDYWGQGTTVTVSSGGGGSGGGGSGGGGSDIVMTQSHKFMSTSVGDRVSIICKASQDVGTAVDWYQQKPGQSPKLLIYWASTRHTGVPDRFTGSGSGTDFTLTITNVQSEDLADYFCQQYNSYPLTFGAGTMLDLKRAAARSDPASGAGSGSGSALQNEGTGTSRPVSQVTLAAVGGAGATALAFLSFCIIFIIVRSCRKKSARPAAGVGDTGMEDAKAIRGSASQGPLTESWKDGNPLKKPPPAVAPSSGEEGELHYATLSFHKVKPQDPQGQEATDSEYSEIKIHKRETAETQACLRNHNPSSKEVRGSHG

SEQ ID NO: 8094 - protein, 416 aa, Artificial Sequence
  source: /note="Description of Artificial Sequence: Synthetic Chimeric Antigen Receptor"
MALPVTALLLPLALLLHAARPGSGSGAQAAEVQLQQSGPELVKPGTSVRISCKTSGYTFTEYTIHWVKQSHGKSLEWIGNINPNNGGTTYNQKFEDKATLTVDKSSSTAYMELRSLTSEDSAVYYCAAGWNFDYWGQGTTVTVSSGGGGSGGGGSGGGGSDIVMTQSHKFMSTSVGDRVSIICKASQDVGTAVDWYQQKPGQSPKLLIYWASTRHTGVPDRFTGSGSGTDFTLTITNVQSEDLADYFCQQYNSYPLTFGAGTMLDLKRAAARSDPASGAGSGSGSALQSKATSGVTQGVVGGAGATALVFLSFCVIFVVVRSCRKKSARPAAGVGDTGIEDANAVRGSASQGPLTEPWAEDSPPDQPPPASARSSVGEGELQYASLSFQMVKPWDSRGQEATDTEYSEIKIHRSHG

SEQ ID NO: 8095 - protein, 528 aa, Artificial Sequence
  source: /note="Description of Artificial Sequence: Synthetic Chimeric Antigen Receptor"
MALPVTALLLPLALLLHAARPGSGSGAQAAEVQLQQSGPELVKPGTSVRISCKTSGYTFTEYTIHWVKQSHGKSLEWIGNINPNNGGTTYNQKFEDKATLTVDKSSSTAYMELRSLTSEDSAVYYCAAGWNFDYWGQGTTVTVSSGGGGSGGGGSGGGGSDIVMTQSHKFMSTSVGDRVSIICKASQDVGTAVDWYQQKPGQSPKLLIYWASTRHTGVPDRFTGSGSGTDFTLTITNVQSEDLADYFCQQYNSYPLTFGAGTMLDLKRAAARSDPASGAGSGSGSAVHKESGNGHNIWVILVVTLVVPLLLVAVLIVCCCIGSGCGGDPKCMDRVCFWRLGLLRGPGAEDNAHNEILSNADSLSTFVSEQQMESQEPADLTGVTVQSPGEAQCLLGPAEAEGSQRRRLLVPANGADPTETLMLFFDKFANIVPFDSWDQLMRQLDLTKNEIDVVRAGTAGPGDALYAMLMKWVNKTGRNASIHTLLDALERMEERHAKEKIQDLLVDSGKFIYLEDGTGSAVSLESHG

SEQ ID NO: 8096 - protein, 551 aa, Artificial Sequence
  source: /note="Description of Artificial Sequence: Synthetic Chimeric Antigen Receptor"
MALPVTALLLPLALLLHAARPGSGSGAQAAEVQLQQSGPELVKPGTSVRISCKTSGYTFTEYTIHWVKQSHGKSLEWIGNINPNNGGTTYNQKFEDKATLTVDKSSSTAYMELRSLTSEDSAVYYCAAGWNFDYWGQGTTVTVSSGGGGSGGGGSGGGGSDIVMTQSHKFMSTSVGDRVSIICKASQDVGTAVDWYQQKPGQSPKLLIYWASTRHTGVPDRFTGSGSGTDFTLTITNVQSEDLADYFCQQYNSYPLTFGAGTMLDLKRAAARSDPASGAGSGSGSAVHKESGTKHSGEAPAVEETVTSSPGTPASPCSLSGIIIGVTVAAVVLIVAVFVCKSLLWKKVLPYLKGICSGGGGDPERVDRSSQRPGAEDNVLNEIVSILQPTQVPEQEMEVQEPAEPTGVNMLSPGESEHLLEPAEAERSQRRRLLVPANEGDPTETLRQCFDDFADLVPFDSWEPLMRKLGLMDNEIKVAKAEAAGHRDTLYTMLIKWVNKTGRDASVHTLLDALETLGERLAKQKIEDHLLSSGKFMYLEGNADSAMSSHG

SEQ ID NO: 8097 - protein, 495 aa, Artificial Sequence
  source: /note="Description of Artificial Sequence: Synthetic Chimeric Antigen Receptor"
MALPVTALLLPLALLLHAARPGSGSGAQAAEVQLQQSGPELVKPGTSVRISCKTSGYTFTEYTIHWVKQSHGKSLEWIGNINPNNGGTTYNQKFEDKATLTVDKSSSTAYMELRSLTSEDSAVYYCAAGWNFDYWGQGTTVTVSSGGGGSGGGGSGGGGSDIVMTQSHKFMSTSVGDRVSIICKASQDVGTAVDWYQQKPGQSPKLLIYWASTRHTGVPDRFTGSGSGTDFTLTITNVQSEDLADYFCQQYNSYPLTFGAGTMLDLKRAAARSDPASGAGSGSGSAKNESAASSTGKTPAAEETVTTILGMLASPYHYLIIIVVLVIILAVVVVGFSCRKKFISYLKGICSGGGGGPERVHRVLFRRRSCPSRVPGAEDNARNETLSNRYLQPTQVSEQEIQGQELAELTGVTVELPEEPQRLLEQAEAEGCQRRRLLVPVNDADSADISTLLDASATLEEGHAKETIQDQLVGSEKLFYEEDEAGSATSCLSHG

SEQ ID NO: 8098 - protein, 792 aa, Artificial Sequence
  source: /note="Description of Artificial Sequence: Synthetic Chimeric Antigen Receptor"
MALPVTALLLPLALLLHAARPGSGSGAQAAEVQLQQSGPELVKPGTSVRISCKTSGYTFTEYTIHWVKQSHGKSLEWIGNINPNNGGTTYNQKFEDKATLTVDKSSSTAYMELRSLTSEDSAVYYCAAGWNFDYWGQGTTVTVSSGGGGSGGGGSGGGGSDIVMTQSHKFMSTSVGDRVSIICKASQDVGTAVDWYQQKPGQSPKLLIYWASTRHTGVPDRFTGSGSGTDFTLTITNVQSEDLADYFCQQYNSYPLTFGAGTMLDLKRAAARSDPASGAGSGSGSAVHKESGNGHNIWVILVVTLVVPLLLVAVLIVCCCIGSGCGGDPKCMDRVCFWRLGLLRGPGAEDNAHNEILSNADSLSTFVSEQQMESQEPADLTGVTVQSPGEAQCLLGPAEAEGSQRRRLLVPANGADPTETLMLFFDKFANIVPFDSWDQLMRQLDLTKNEIDVVRAGTAGPGDALYAMLMKWVNKTGRNASIHTLLDALERMEERHAKEKIQDLLVDSGKFIYLEDGTGSAVSLESHGGSGEGRGSLLTCGDVEENPGPHMVSKGEELFTGVVPILVELDGDVNGHKFSVSGEGEGDATYGKLTLKFICTTGKLPVPWPTLVTTLTYGVQCFSRYPDHMKQHDFFKSAMPEGYVQERTIFFKDDGNYKTRAEVKFEGDTLVNRIELKGIDFKEDGNILGHKLEYNYNSHNVYIMADKQKNGIKVNFKIRHNIEDGSVQLADHYQQNTPIGDGPVLLPDNHYLSTQSALSKDPNEKRDHMVLLEFVTAAGITLGMDELYKAAD

SEQ ID NO: 8099 - protein, 815 aa, Artificial Sequence
  source: /note="Description of Artificial Sequence: Synthetic Chimeric Antigen Receptor"
MALPVTALLLPLALLLHAARPGSGSGAQAAEVQLQQSGPELVKPGTSVRISCKTSGYTFTEYTIHWVKQSHGKSLEWIGNINPNNGGTTYNQKFEDKATLTVDKSSSTAYMELRSLTSEDSAVYYCAAGWNFDYWGQGTTVTVSSGGGGSGGGGSGGGGSDIVMTQSHKFMSTSVGDRVSIICKASQDVGTAVDWYQQKPGQSPKLLIYWASTRHTGVPDRFTGSGSGTDFTLTITNVQSEDLADYFCQQYNSYPLTFGAGTMLDLKRAAARSDPASGAGSGSGSAVHKESGTKHSGEAPAVEETVTSSPGTPASPCSLSGIIIGVTVAAVVLIVAVFVCKSLLWKKVLPYLKGICSGGGGDPERVDRSSQRPGAEDNVLNEIVSILQPTQVPEQEMEVQEPAEPTGVNMLSPGESEHLLEPAEAERSQRRRLLVPANEGDPTETLRQCFDDFADLVPFDSWEPLMRKLGLMDNEIKVAKAEAAGHRDTLYTMLIKWVNKTGRDASVHTLLDALETLGERLAKQKIEDHLLSSGKFMYLEGNADSAMSSHGGSGEGRGSLLTCGDVEENPGPHMVSKGEELFTGVVPILVELDGDVNGHKFSVSGEGEGDATYGKLTLKFICTTGKLPVPWPTLVTTLTYGVQCFSRYPDHMKQHDFFKSAMPEGYVQERTIFFKDDGNYKTRAEVKFEGDTLVNRIELKGIDFKEDGNILGHKLEYNYNSHNVYIMADKQKNGIKVNFKIRHNIEDGSVQLADHYQQNTPIGDGPVLLPDNHYLSTQSALSKDPNEKRDHMVLLEFVTAAGITLGMDELYKAAD

SEQ ID NO: 8100 - protein, 759 aa, Artificial Sequence
  source: /note="Description of Artificial Sequence: Synthetic Chimeric Antigen Receptor"
MALPVTALLLPLALLLHAARPGSGSGAQAAEVQLQQSGPELVKPGTSVRISCKTSGYTFTEYTIHWVKQSHGKSLEWIGNINPNNGGTTYNQKFEDKATLTVDKSSSTAYMELRSLTSEDSAVYYCAAGWNFDYWGQGTTVTVSSGGGGSGGGGSGGGGSDIVMTQSHKFMSTSVGDRVSIICKASQDVGTAVDWYQQKPGQSPKLLIYWASTRHTGVPDRFTGSGSGTDFTLTITNVQSEDLADYFCQQYNSYPLTFGAGTMLDLKRAAARSDPASGAGSGSGSAKNESAASSTGKTPAAEETVTTILGMLASPYHYLIIIVVLVIILAVVVVGFSCRKKFISYLKGICSGGGGGPERVHRVLFRRRSCPSRVPGAEDNARNETLSNRYLQPTQVSEQEIQGQELAELTGVTVELPEEPQRLLEQAEAEGCQRRRLLVPVNDADSADISTLLDASATLEEGHAKETIQDQLVGSEKLFYEEDEAGSATSCLSHGGSGEGRGSLLTCGDVEENPGPHMVSKGEELFTGVVPILVELDGDVNGHKFSVSGEGEGDATYGKLTLKFICTTGKLPVPWPTLVTTLTYGVQCFSRYPDHMKQHDFFKSAMPEGYVQERTIFFKDDGNYKTRAEVKFEGDTLVNRIELKGIDFKEDGNILGHKLEYNYNSHNVYIMADKQKNGIKVNFKIRHNIEDGSVQLADHYQQNTPIGDGPVLLPDNHYLSTQSALSKDPNEKRDHMVLLEFVTAAGITLGMDELYKAAD

SEQ ID NO: 8101 - protein, 670 aa, Artificial Sequence
  source: /note="Description of Artificial Sequence: Synthetic Chimeric Antigen Receptor"
MALPVTALLLPLALLLHAEVQLQQSGPELVKPGTSVRISCKTSGYTFTEYTIHWVKQSHGKSLEWIGNINPNNGGTTYNQKFEDKATLTVDKSSSTAYMELRSLTSEDSAVYYCAAGWNFDYWGQGTTVTVSSGGGGSGGGGSGGGGSDIVMTQSHKFMSTSVGDRVSIICKASQDVGTAVDWYQQKPGQSPKLLIYWASTRHTGVPDRFTGSGSGTDFTLTITNVQSEDLADYFCQQYNSYPLTFGAGTMLDLKRAAATERRAEVPTAHPSPSPRPAGQFQTLVVGVVGGLLGSLVLLVWVLAVICSRAARGTIGARRTGQPLKEDPSAVPVFSVDYGELDFQWREKTPEPPVPCVPEQTEYATIVFPSGMGTSSPARRGSADGPRSAQPLRPEDGHCSWPLSHGGSGEGRGSLLTCGDVEENPGPHMVSKGEELFTGVVPILVELDGDVNGHKFSVSGEGEGDATYGKLTLKFICTTGKLPVPWPTLVTTLTYGVQCFSRYPDHMKQHDFFKSAMPEGYVQERTIFFKDDGNYKTRAEVKFEGDTLVNRIELKGIDFKEDGNILGHKLEYNYNSHNVYIMADKQKNGIKVNFKIRHNIEDGSVQLADHYQQNTPIGDGPVLLPDNHYLSTQSALSKDPNEKRDHMVLLEFVTAAGITLGMDELYKAAD

SEQ ID NO: 8102 - protein, 434 aa, Artificial Sequence
  source: /note="Description of Artificial Sequence: Synthetic Chimeric Antigen Receptor"
QVQLQQSGAELVRPGASVTLSCKASGYTFSDYEMHWVIQTPVHGLEWIGAIDPETGGTAYNQKFKGKAILTADKSSSTAYMELRSLTSEDSAVYYCTGYYDYDSFTYWGQGTLVTVSAGGGGSGGGGSGGGGSDIVMTQSQKIMSTTVGDRVSITCKASQNVDAAVAWYQQKPGQSPKLLIYSASNRYTGVPDRFTGSGSGTDFTLTISNMQSEDLADYFCQQYDIYPYTFGGGTKLEIKGLAVSTISSFFPPGYQIYIWAPLAGTCGVLLLSLVITLYCKRGRKKLLYIFKQPFMRPVQTTQEEDGCSCRFPEEEEGGCELRVKFSRSADAPAYQQGQNQLYNELNLGRREEYDVLDKRRGRDPEMGGKPRRKNPQEGLYNELQKDKMAEAYSEIGMKGERRRGKGHDGLYQGLSTATKDTYDALHMQALPPR

SEQ ID NO: 8103 - protein, 437 aa, Artificial Sequence
  source: /note="Description of Artificial Sequence: Synthetic Chimeric Antigen Receptor"
QVQLQQSGAELVRPGASVTLSCKASGYTFSDYEMHWVIQTPVHGLEWIGAIDPETGGTAYNQKFKGKAILTADKSSSTAYMELRSLTSEDSAVYYCTGYYDYDSFTYWGQGTLVTVSAGGGGSGGGGSGGGGSDIVMTQSQKIMSTTVGDRVSITCKASQNVDAAVAWYQQKPGQSPKLLIYSASNRYTGVPDRFTGSGSGTDFTLTISNMQSEDLADYFCQQYDIYPYTFGGGTKLEIKGLAVSTISSFFPPGYQIISFFLALTSTALLFLLFFLTLRFSVVKRGRKKLLYIFKQPFMRPVQTTQEEDGCSCRFPEEEEGGCELRVKFSRSADAPAYQQGQNQLYNELNLGRREEYDVLDKRRGRDPEMGGKPRRKNPQEGLYNELQKDKMAEAYSEIGMKGERRRGKGHDGLYQGLSTATKDTYDALHMQALPPR

SEQ ID NO: 8104 - protein, 463 aa, Artificial Sequence
  source: /note="Description of Artificial Sequence: Synthetic Chimeric Antigen Receptor"
QVQLQQSGAELVRPGASVTLSCKASGYTFSDYEMHWVIQTPVHGLEWIGAIDPETGGTAYNQKFKGKAILTADKSSSTAYMELRSLTSEDSAVYYCTGYYDYDSFTYWGQGTLVTVSAGGGGSGGGGSGGGGSDIVMTQSQKIMSTTVGDRVSITCKASQNVDAAVAWYQQKPGQSPKLLIYSASNRYTGVPDRFTGSGSGTDFTLTISNMQSEDLADYFCQQYDIYPYTFGGGTKLEIKTTTPAPRPPTPAPTIASQPLSLRPEACRPAAGGAVHTRGLDFACDIYIWAPLAGTCGVLLLSLVITLYCKRGRKKLLYIFKQPFMRPVQTTQEEDGCSCRFPEEEEGGCELRVKFSRSADAPAYQQGQNQLYNELNLGRREEYDVLDKRRGRDPEMGGKPRRKNPQEGLYNELQKDKMAEAYSEIGMKGERRRGKGHDGLYQGLSTATKDTYDALHMQALPPR

SEQ ID NO: 8105 - protein, 466 aa, Artificial Sequence
  source: /note="Description of Artificial Sequence: Synthetic Chimeric Antigen Receptor"
QVQLQQSGAELVRPGASVTLSCKASGYTFSDYEMHWVIQTPVHGLEWIGAIDPETGGTAYNQKFKGKAILTADKSSSTAYMELRSLTSEDSAVYYCTGYYDYDSFTYWGQGTLVTVSAGGGGSGGGGSGGGGSDIVMTQSQKIMSTTVGDRVSITCKASQNVDAAVAWYQQKPGQSPKLLIYSASNRYTGVPDRFTGSGSGTDFTLTISNMQSEDLADYFCQQYDIYPYTFGGGTKLEIKTTTPAPRPPTPAPTIASQPLSLRPEACRPAAGGAVHTRGLDFACDIISFFLALTSTALLFLLFFLTLRFSVVKRGRKKLLYIFKQPFMRPVQTTQEEDGCSCRFPEEEEGGCELRVKFSRSADAPAYQQGQNQLYNELNLGRREEYDVLDKRRGRDPEMGGKPRRKNPQEGLYNELQKDKMAEAYSEIGMKGERRRGKGHDGLYQGLSTATKDTYDALHMQALPPR

SEQ ID NO: 8106 - protein, 649 aa, Artificial Sequence
  source: /note="Description of Artificial Sequence: Synthetic Chimeric Antigen Receptor"
QVQLQQSGAELVRPGASVTLSCKASGYTFSDYEMHWVIQTPVHGLEWIGAIDPETGGTAYNQKFKGKAILTADKSSSTAYMELRSLTSEDSAVYYCTGYYDYDSFTYWGQGTLVTVSAGGGGSGGGGSGGGGSDIVMTQSQKIMSTTVGDRVSITCKASQNVDAAVAWYQQKPGQSPKLLIYSASNRYTGVPDRFTGSGSGTDFTLTISNMQSEDLADYFCQQYDIYPYTFGGGTKLEIKEPKSPDKTHTCPPCPAPPVAGPSVFLFPPKPKDTLMIARTPEVTCVVVDVSHEDPEVKFNWYVDGVEVHNAKTKPREEQYNSTYRVVSVLTVLHQDWLNGKEYKCKVSNKALPAPIEKTISKAKGQPREPQVYTLPPSRDELTKNQVSLTCLVKGFYPSDIAVEWESNGQPENNYKTTPPVLDSDGSFFLYSKLTVDKSRWQQGNVFSCSVMHEALHNHYTQKSLSLSPGKIYIWAPLAGTCGVLLLSLVITLYCKRGRKKLLYIFKQPFMRPVQTTQEEDGCSCRFPEEEEGGCELRVKFSRSADAPAYQQGQNQLYNELNLGRREEYDVLDKRRGRDPEMGGKPRRKNPQEGLYNELQKDKMAEAYSEIGMKGERRRGKGHDGLYQGLSTATKDTYDALHMQALPPR

SEQ ID NO: 8107 - protein, 652 aa, Artificial Sequence
  source: /note="Description of Artificial Sequence: Synthetic Chimeric Antigen Receptor"
QVQLQQSGAELVRPGASVTLSCKASGYTFSDYEMHWVIQTPVHGLEWIGAIDPETGGTAYNQKFKGKAILTADKSSSTAYMELRSLTSEDSAVYYCTGYYDYDSFTYWGQGTLVTVSAGGGGSGGGGSGGGGSDIVMTQSQKIMSTTVGDRVSITCKASQNVDAAVAWYQQKPGQSPKLLIYSASNRYTGVPDRFTGSGSGTDFTLTISNMQSEDLADYFCQQYDIYPYTFGGGTKLEIKEPKSPDKTHTCPPCPAPPVAGPSVFLFPPKPKDTLMIARTPEVTCVVVDVSHEDPEVKFNWYVDGVEVHNAKTKPREEQYNSTYRVVSVLTVLHQDWLNGKEYKCKVSNKALPAPIEKTISKAKGQPREPQVYTLPPSRDELTKNQVSLTCLVKGFYPSDIAVEWESNGQPENNYKTTPPVLDSDGSFFLYSKLTVDKSRWQQGNVFSCSVMHEALHNHYTQKSLSLSPGKIISFFLALTSTALLFLLFFLTLRFSVVKRGRKKLLYIFKQPFMRPVQTTQEEDGCSCRFPEEEEGGCELRVKFSRSADAPAYQQGQNQLYNELNLGRREEYDVLDKRRGRDPEMGGKPRRKNPQEGLYNELQKDKMAEAYSEIGMKGERRRGKGHDGLYQGLSTATKDTYDALHMQALPPR

SEQ ID NO: 8108 - protein, 435 aa, Artificial Sequence
  source: /note="Description of Artificial Sequence: Synthetic Chimeric Antigen Receptor"
EVKLVESGGGLVKPGGSLKLSCAASGFTFSSYAMSWVRQIPEKRLEWVASISRGGTTYYPDSVKGRFTISRDNVRNILYLQMSSLRSEDTAMYYCGRYDYDGYYAMDYWGQGTSVTVSSGGGGSGGGGSGGGGSDIKMTQSPSSMYASLGERVTITCKASPDINSYLSWFQQKPGKSPKTLIYRANRLVDGVPSRFSGGGSGQDYSLTINSLEYEDMGIYYCLQYDEFPYTFGGGTKLEMKGLAVSTISSFFPPGYQIYIWAPLAGTCGVLLLSLVITLYCKRGRKKLLYIFKQPFMRPVQTTQEEDGCSCRFPEEEEGGCELRVKFSRSADAPAYQQGQNQLYNELNLGRREEYDVLDKRRGRDPEMGGKPRRKNPQEGLYNELQKDKMAEAYSEIGMKGERRRGKGHDGLYQGLSTATKDTYDALHMQALPPR

SEQ ID NO: 8109 - protein, 438 aa, Artificial Sequence
  source: /note="Description of Artificial Sequence: Synthetic Chimeric Antigen Receptor"
EVKLVESGGGLVKPGGSLKLSCAASGFTFSSYAMSWVRQIPEKRLEWVASISRGGTTYYPDSVKGRFTISRDNVRNILYLQMSSLRSEDTAMYYCGRYDYDGYYAMDYWGQGTSVTVSSGGGGSGGGGSGGGGSDIKMTQSPSSMYASLGERVTITCKASPDINSYLSWFQQKPGKSPKTLIYRANRLVDGVPSRFSGGGSGQDYSLTINSLEYEDMGIYYCLQYDEFPYTFGGGTKLEMKGLAVSTISSFFPPGYQIISFFLALTSTALLFLLFFLTLRFSVVKRGRKKLLYIFKQPFMRPVQTTQEEDGCSCRFPEEEEGGCELRVKFSRSADAPAYQQGQNQLYNELNLGRREEYDVLDKRRGRDPEMGGKPRRKNPQEGLYNELQKDKMAEAYSEIGMKGERRRGKGHDGLYQGLSTATKDTYDALHMQALPPR

SEQ ID NO: 8110 - protein, 464 aa, Artificial Sequence
  source: /note="Description of Artificial Sequence: Synthetic Chimeric Antigen Receptor"
EVKLVESGGGLVKPGGSLKLSCAASGFTFSSYAMSWVRQIPEKRLEWVASISRGGTTYYPDSVKGRFTISRDNVRNILYLQMSSLRSEDTAMYYCGRYDYDGYYAMDYWGQGTSVTVSSGGGGSGGGGSGGGGSDIKMTQSPSSMYASLGERVTITCKASPDINSYLSWFQQKPGKSPKTLIYRANRLVDGVPSRFSGGGSGQDYSLTINSLEYEDMGIYYCLQYDEFPYTFGGGTKLEMKTTTPAPRPPTPAPTIASQPLSLRPEACRPAAGGAVHTRGLDFACDIYIWAPLAGTCGVLLLSLVITLYCKRGRKKLLYIFKQPFMRPVQTTQEEDGCSCRFPEEEEGGCELRVKFSRSADAPAYQQGQNQLYNELNLGRREEYDVLDKRRGRDPEMGGKPRRKNPQEGLYNELQKDKMAEAYSEIGMKGERRRGKGHDGLYQGLSTATKDTYDALHMQALPPR

SEQ ID NO: 8111 - protein, 467 aa, Artificial Sequence
  source: /note="Description of Artificial Sequence: Synthetic Chimeric Antigen Receptor"
EVKLVESGGGLVKPGGSLKLSCAASGFTFSSYAMSWVRQIPEKRLEWVASISRGGTTYYPDSVKGRFTISRDNVRNILYLQMSSLRSEDTAMYYCGRYDYDGYYAMDYWGQGTSVTVSSGGGGSGGGGSGGGGSDIKMTQSPSSMYASLGERVTITCKASPDINSYLSWFQQKPGKSPKTLIYRANRLVDGVPSRFSGGGSGQDYSLTINSLEYEDMGIYYCLQYDEFPYTFGGGTKLEMKTTTPAPRPPTPAPTIASQPLSLRPEACRPAAGGAVHTRGLDFACDIISFFLALTSTALLFLLFFLTLRFSVVKRGRKKLLYIFKQPFMRPVQTTQEEDGCSCRFPEEEEGGCELRVKFSRSADAPAYQQGQNQLYNELNLGRREEYDVLDKRRGRDPEMGGKPRRKNPQEGLYNELQKDKMAEAYSEIGMKGERRRGKGHDGLYQGLSTATKDTYDALHMQALPPR

SEQ ID NO: 8112 - protein, 650 aa, Artificial Sequence
  source: /note="Description of Artificial Sequence: Synthetic Chimeric Antigen Receptor"
EVKLVESGGGLVKPGGSLKLSCAASGFTFSSYAMSWVRQIPEKRLEWVASISRGGTTYYPDSVKGRFTISRDNVRNILYLQMSSLRSEDTAMYYCGRYDYDGYYAMDYWGQGTSVTVSSGGGGSGGGGSGGGGSDIKMTQSPSSMYASLGERVTITCKASPDINSYLSWFQQKPGKSPKTLIYRANRLVDGVPSRFSGGGSGQDYSLTINSLEYEDMGIYYCLQYDEFPYTFGGGTKLEMKEPKSPDKTHTCPPCPAPPVAGPSVFLFPPKPKDTLMIARTPEVTCVVVDVSHEDPEVKFNWYVDGVEVHNAKTKPREEQYNSTYRVVSVLTVLHQDWLNGKEYKCKVSNKALPAPIEKTISKAKGQPREPQVYTLPPSRDELTKNQVSLTCLVKGFYPSDIAVEWESNGQPENNYKTTPPVLDSDGSFFLYSKLTVDKSRWQQGNVFSCSVMHEALHNHYTQKSLSLSPGKIYIWAPLAGTCGVLLLSLVITLYCKRGRKKLLYIFKQPFMRPVQTTQEEDGCSCRFPEEEEGGCELRVKFSRSADAPAYQQGQNQLYNELNLGRREEYDVLDKRRGRDPEMGGKPRRKNPQEGLYNELQKDKMAEAYSEIGMKGERRRGKGHDGLYQGLSTATKDTYDALHMQALPPR

SEQ ID NO: 8113 - protein, 653 aa, Artificial Sequence
  source: /note="Description of Artificial Sequence: Synthetic Chimeric Antigen Receptor"
EVKLVESGGGLVKPGGSLKLSCAASGFTFSSYAMSWVRQIPEKRLEWVASISRGGTTYYPDSVKGRFTISRDNVRNILYLQMSSLRSEDTAMYYCGRYDYDGYYAMDYWGQGTSVTVSSGGGGSGGGGSGGGGSDIKMTQSPSSMYASLGERVTITCKASPDINSYLSWFQQKPGKSPKTLIYRANRLVDGVPSRFSGGGSGQDYSLTINSLEYEDMGIYYCLQYDEFPYTFGGGTKLEMKEPKSPDKTHTCPPCPAPPVAGPSVFLFPPKPKDTLMIARTPEVTCVVVDVSHEDPEVKFNWYVDGVEVHNAKTKPREEQYNSTYRVVSVLTVLHQDWLNGKEYKCKVSNKALPAPIEKTISKAKGQPREPQVYTLPPSRDELTKNQVSLTCLVKGFYPSDIAVEWESNGQPENNYKTTPPVLDSDGSFFLYSKLTVDKSRWQQGNVFSCSVMHEALHNHYTQKSLSLSPGKIISFFLALTSTALLFLLFFLTLRFSVVKRGRKKLLYIFKQPFMRPVQTTQEEDGCSCRFPEEEEGGCELRVKFSRSADAPAYQQGQNQLYNELNLGRREEYDVLDKRRGRDPEMGGKPRRKNPQEGLYNELQKDKMAEAYSEIGMKGERRRGKGHDGLYQGLSTATKDTYDALHMQALPPR

SEQ ID NO: 8114 - protein, 432 aa, Artificial Sequence
  source: /note="Description of Artificial Sequence: Synthetic Chimeric Antigen Receptor"
QVQLKESGPGLVAPSQTLSITCTVSGFSLTSYGVHWVRQPPGKGLEWLGVIWAGGFTNYNSALKSRLSISKDNSKSQVLLKMTSLQTDDTAMYYCARRGSSYSMDYWGQGTSVTVSSGGGGSGGGGSGGGGSEIVLSQSPAITAASLGQKVTITCSASSNVSYIHWYQQRSGTSPRPWIYEISKLASGVPVRFSGSGSGTSYSLTISSMEAEDAAIYYCQQWNYPLITFGSGTKLEIQGLAVSTISSFFPPGYQIYIWAPLAGTCGVLLLSLVITLYCKRGRKKLLYIFKQPFMRPVQTTQEEDGCSCRFPEEEEGGCELRVKFSRSADAPAYQQGQNQLYNELNLGRREEYDVLDKRRGRDPEMGGKPRRKNPQEGLYNELQKDKMAEAYSEIGMKGERRRGKGHDGLYQGLSTATKDTYDALHMQALPPR

SEQ ID NO: 8115 - protein, 435 aa, Artificial Sequence
  source: /note="Description of Artificial Sequence: Synthetic Chimeric Antigen Receptor"
QVQLKESGPGLVAPSQTLSITCTVSGFSLTSYGVHWVRQPPGKGLEWLGVIWAGGFTNYNSALKSRLSISKDNSKSQVLLKMTSLQTDDTAMYYCARRGSSYSMDYWGQGTSVTVSSGGGGSGGGGSGGGGSEIVLSQSPAITAASLGQKVTITCSASSNVSYIHWYQQRSGTSPRPWIYEISKLASGVPVRFSGSGSGTSYSLTISSMEAEDAAIYYCQQWNYPLITFGSGTKLEIQGLAVSTISSFFPPGYQIISFFLALTSTALLFLLFFLTLRFSVVKRGRKKLLYIFKQPFMRPVQTTQEEDGCSCRFPEEEEGGCELRVKFSRSADAPAYQQGQNQLYNELNLGRREEYDVLDKRRGRDPEMGGKPRRKNPQEGLYNELQKDKMAEAYSEIGMKGERRRGKGHDGLYQGLSTATKDTYDALHMQALPPR

SEQ ID NO: 8116 - protein, 461 aa, Artificial Sequence
  source: /note="Description of Artificial Sequence: Synthetic Chimeric Antigen Receptor"
QVQLKESGPGLVAPSQTLSITCTVSGFSLTSYGVHWVRQPPGKGLEWLGVIWAGGFTNYNSALKSRLSISKDNSKSQVLLKMTSLQTDDTAMYYCARRGSSYSMDYWGQGTSVTVSSGGGGSGGGGSGGGGSEIVLSQSPAITAASLGQKVTITCSASSNVSYIHWYQQRSGTSPRPWIYEISKLASGVPVRFSGSGSGTSYSLTISSMEAEDAAIYYCQQWNYPLITFGSGTKLEIQTTTPAPRPPTPAPTIASQPLSLRPEACRPAAGGAVHTRGLDFACDIYIWAPLAGTCGVLLLSLVITLYCKRGRKKLLYIFKQPFMRPVQTTQEEDGCSCRFPEEEEGGCELRVKFSRSADAPAYQQGQNQLYNELNLGRREEYDVLDKRRGRDPEMGGKPRRKNPQEGLYNELQKDKMAEAYSEIGMKGERRRGKGHDGLYQGLSTATKDTYDALHMQALPPR

SEQ ID NO: 8117 - protein, 464 aa, Artificial Sequence
  source: /note="Description of Artificial Sequence: Synthetic Chimeric Antigen Receptor"
QVQLKESGPGLVAPSQTLSITCTVSGFSLTSYGVHWVRQPPGKGLEWLGVIWAGGFTNYNSALKSRLSISKDNSKSQVLLKMTSLQTDDTAMYYCARRGSSYSMDYWGQGTSVTVSSGGGGSGGGGSGGGGSEIVLSQSPAITAASLGQKVTITCSASSNVSYIHWYQQRSGTSPRPWIYEISKLASGVPVRFSGSGSGTSYSLTISSMEAEDAAIYYCQQWNYPLITFGSGTKLEIQTTTPAPRPPTPAPTIASQPLSLRPEACRPAAGGAVHTRGLDFACDIISFFLALTSTALLFLLFFLTLRFSVVKRGRKKLLYIFKQPFMRPVQTTQEEDGCSCRFPEEEEGGCELRVKFSRSADAPAYQQGQNQLYNELNLGRREEYDVLDKRRGRDPEMGGKPRRKNPQEGLYNELQKDKMAEAYSEIGMKGERRRGKGHDGLYQGLSTATKDTYDALHMQALPPR

SEQ ID NO: 8118 - protein, 647 aa, Artificial Sequence
  source: /note="Description of Artificial Sequence: Synthetic Chimeric Antigen Receptor"
QVQLKESGPGLVAPSQTLSITCTVSGFSLTSYGVHWVRQPPGKGLEWLGVIWAGGFTNYNSALKSRLSISKDNSKSQVLLKMTSLQTDDTAMYYCARRGSSYSMDYWGQGTSVTVSSGGGGSGGGGSGGGGSEIVLSQSPAITAASLGQKVTITCSASSNVSYIHWYQQRSGTSPRPWIYEISKLASGVPVRFSGSGSGTSYSLTISSMEAEDAAIYYCQQWNYPLITFGSGTKLEIQEPKSPDKTHTCPPCPAPPVAGPSVFLFPPKPKDTLMIARTPEVTCVVVDVSHEDPEVKFNWYVDGVEVHNAKTKPREEQYNSTYRVVSVLTVLHQDWLNGKEYKCKVSNKALPAPIEKTISKAKGQPREPQVYTLPPSRDELTKNQVSLTCLVKGFYPSDIAVEWESNGQPENNYKTTPPVLDSDGSFFLYSKLTVDKSRWQQGNVFSCSVMHEALHNHYTQKSLSLSPGKIYIWAPLAGTCGVLLLSLVITLYCKRGRKKLLYIFKQPFMRPVQTTQEEDGCSCRFPEEEEGGCELRVKFSRSADAPAYQQGQNQLYNELNLGRREEYDVLDKRRGRDPEMGGKPRRKNPQEGLYNELQKDKMAEAYSEIGMKGERRRGKGHDGLYQGLSTATKDTYDALHMQALPPR

SEQ ID NO: 8119 - protein, 650 aa, Artificial Sequence
  source: /note="Description of Artificial Sequence: Synthetic Chimeric Antigen Receptor"
QVQLKESGPGLVAPSQTLSITCTVSGFSLTSYGVHWVRQPPGKGLEWLGVIWAGGFTNYNSALKSRLSISKDNSKSQVLLKMTSLQTDDTAMYYCARRGSSYSMDYWGQGTSVTVSSGGGGSGGGGSGGGGSEIVLSQSPAITAASLGQKVTITCSASSNVSYIHWYQQRSGTSPRPWIYEISKLASGVPVRFSGSGSGTSYSLTISSMEAEDAAIYYCQQWNYPLITFGSGTKLEIQEPKSPDKTHTCPPCPAPPVAGPSVFLFPPKPKDTLMIARTPEVTCVVVDVSHEDPEVKFNWYVDGVEVHNAKTKPREEQYNSTYRVVSVLTVLHQDWLNGKEYKCKVSNKALPAPIEKTISKAKGQPREPQVYTLPPSRDELTKNQVSLTCLVKGFYPSDIAVEWESNGQPENNYKTTPPVLDSDGSFFLYSKLTVDKSRWQQGNVFSCSVMHEALHNHYTQKSLSLSPGKIISFFLALTSTALLFLLFFLTLRFSVVKRGRKKLLYIFKQPFMRPVQTTQEEDGCSCRFPEEEEGGCELRVKFSRSADAPAYQQGQNQLYNELNLGRREEYDVLDKRRGRDPEMGGKPRRKNPQEGLYNELQKDKMAEAYSEIGMKGERRRGKGHDGLYQGLSTATKDTYDALHMQALPPR

SEQ ID NO: 8120 - protein, 435 aa, Artificial Sequence
  source: /note="Description of Artificial Sequence: Synthetic Chimeric Antigen Receptor"
EVQLQQSGPELEKPGASVKISCKASGFAFTGYNMNWVKQTNGKSLEWIGSIDPYYGGSTYNQKFKDKATLTVDKSSSTAYMQLKSLTSDDSAVYYCARSPGGDYAMDYWGQGTSVTVSSGGGGSGGGGSGGGGSDIKMTQSPSSMYASVGERVTITCKASQGINSYSGWFQQKPGKSPKTLIYRGNRLVDGVPSRFSGSGSGQDYSLTISSLEYEDMGIYYCLQYDEFPYTFGGGTKLEIKGLAVSTISSFFPPGYQIYIWAPLAGTCGVLLLSLVITLYCKRGRKKLLYIFKQPFMRPVQTTQEEDGCSCRFPEEEEGGCELRVKFSRSADAPAYQQGQNQLYNELNLGRREEYDVLDKRRGRDPEMGGKPRRKNPQEGLYNELQKDKMAEAYSEIGMKGERRRGKGHDGLYQGLSTATKDTYDALHMQALPPR

SEQ ID NO: 8121 - protein, 438 aa, Artificial Sequence
  source: /note="Description of Artificial Sequence: Synthetic Chimeric Antigen Receptor"
EVQLQQSGPELEKPGASVKISCKASGFAFTGYNMNWVKQTNGKSLEWIGSIDPYYGGSTYNQKFKDKATLTVDKSSSTAYMQLKSLTSDDSAVYYCARSPGGDYAMDYWGQGTSVTVSSGGGGSGGGGSGGGGSDIKMTQSPSSMYASVGERVTITCKASQGINSYSGWFQQKPGKSPKTLIYRGNRLVDGVPSRFSGSGSGQDYSLTISSLEYEDMGIYYCLQYDEFPYTFGGGTKLEIKGLAVSTISSFFPPGYQIISFFLALTSTALLFLLFFLTLRFSVVKRGRKKLLYIFKQPFMRPVQTTQEEDGCSCRFPEEEEGGCELRVKFSRSADAPAYQQGQNQLYNELNLGRREEYDVLDKRRGRDPEMGGKPRRKNPQEGLYNELQKDKMAEAYSEIGMKGERRRGKGHDGLYQGLSTATKDTYDALHMQALPPR

SEQ ID NO: 8122 - protein, 464 aa, Artificial Sequence
  source: /note="Description of Artificial Sequence: Synthetic Chimeric Antigen Receptor"
EVQLQQSGPELEKPGASVKISCKASGFAFTGYNMNWVKQTNGKSLEWIGSIDPYYGGSTYNQKFKDKATLTVDKSSSTAYMQLKSLTSDDSAVYYCARSPGGDYAMDYWGQGTSVTVSSGGGGSGGGGSGGGGSDIKMTQSPSSMYASVGERVTITCKASQGINSYSGWFQQKPGKSPKTLIYRGNRLVDGVPSRFSGSGSGQDYSLTISSLEYEDMGIYYCLQYDEFPYTFGGGTKLEIKTTTPAPRPPTPAPTIASQPLSLRPEACRPAAGGAVHTRGLDFACDIYIWAPLAGTCGVLLLSLVITLYCKRGRKKLLYIFKQPFMRPVQTTQEEDGCSCRFPEEEEGGCELRVKFSRSADAPAYQQGQNQLYNELNLGRREEYDVLDKRRGRDPEMGGKPRRKNPQEGLYNELQKDKMAEAYSEIGMKGERRRGKGHDGLYQGLSTATKDTYDALHMQALPPR

SEQ ID NO: 8123 - protein, 467 aa, Artificial Sequence
  source: /note="Description of Artificial Sequence: Synthetic Chimeric Antigen Receptor"
EVQLQQSGPELEKPGASVKISCKASGFAFTGYNMNWVKQTNGKSLEWIGSIDPYYGGSTYNQKFKDKATLTVDKSSSTAYMQLKSLTSDDSAVYYCARSPGGDYAMDYWGQGTSVTVSSGGGGSGGGGSGGGGSDIKMTQSPSSMYASVGERVTITCKASQGINSYSGWFQQKPGKSPKTLIYRGNRLVDGVPSRFSGSGSGQDYSLTISSLEYEDMGIYYCLQYDEFPYTFGGGTKLEIKTTTPAPRPPTPAPTIASQPLSLRPEACRPAAGGAVHTRGLDFACDIISFFLALTSTALLFLLFFLTLRFSVVKRGRKKLLYIFKQPFMRPVQTTQEEDGCSCRFPEEEEGGCELRVKFSRSADAPAYQQGQNQLYNELNLGRREEYDVLDKRRGRDPEMGGKPRRKNPQEGLYNELQKDKMAEAYSEIGMKGERRRGKGHDGLYQGLSTATKDTYDALHMQALPPR

SEQ ID NO: 8124 - protein, 650 aa, Artificial Sequence
  source: /note="Description of Artificial Sequence: Synthetic Chimeric Antigen Receptor"
EVQLQQSGPELEKPGASVKISCKASGFAFTGYNMNWVKQTNGKSLEWIGSIDPYYGGSTYNQKFKDKATLTVDKSSSTAYMQLKSLTSDDSAVYYCARSPGGDYAMDYWGQGTSVTVSSGGGGSGGGGSGGGGSDIKMTQSPSSMYASVGERVTITCKASQGINSYSGWFQQKPGKSPKTLIYRGNRLVDGVPSRFSGSGSGQDYSLTISSLEYEDMGIYYCLQYDEFPYTFGGGTKLEIKEPKSPDKTHTCPPCPAPPVAGPSVFLFPPKPKDTLMIARTPEVTCVVVDVSHEDPEVKFNWYVDGVEVHNAKTKPREEQYNSTYRVVSVLTVLHQDWLNGKEYKCKVSNKALPAPIEKTISKAKGQPREPQVYTLPPSRDELTKNQVSLTCLVKGFYPSDIAVEWESNGQPENNYKTTPPVLDSDGSFFLYSKLTVDKSRWQQGNVFSCSVMHEALHNHYTQKSLSLSPGKIYIWAPLAGTCGVLLLSLVITLYCKRGRKKLLYIFKQPFMRPVQTTQEEDGCSCRFPEEEEGGCELRVKFSRSADAPAYQQGQNQLYNELNLGRREEYDVLDKRRGRDPEMGGKPRRKNPQEGLYNELQKDKMAEAYSEIGMKGERRRGKGHDGLYQGLSTATKDTYDALHMQALPPR

SEQ ID NO: 8125 - protein, 653 aa, Artificial Sequence
  source: /note="Description of Artificial Sequence: Synthetic Chimeric Antigen Receptor"
EVQLQQSGPELEKPGASVKISCKASGFAFTGYNMNWVKQTNGKSLEWIGSIDPYYGGSTYNQKFKDKATLTVDKSSSTAYMQLKSLTSDDSAVYYCARSPGGDYAMDYWGQGTSVTVSSGGGGSGGGGSGGGGSDIKMTQSPSSMYASVGERVTITCKASQGINSYSGWFQQKPGKSPKTLIYRGNRLVDGVPSRFSGSGSGQDYSLTISSLEYEDMGIYYCLQYDEFPYTFGGGTKLEIKEPKSPDKTHTCPPCPAPPVAGPSVFLFPPKPKDTLMIARTPEVTCVVVDVSHEDPEVKFNWYVDGVEVHNAKTKPREEQYNSTYRVVSVLTVLHQDWLNGKEYKCKVSNKALPAPIEKTISKAKGQPREPQVYTLPPSRDELTKNQVSLTCLVKGFYPSDIAVEWESNGQPENNYKTTPPVLDSDGSFFLYSKLTVDKSRWQQGNVFSCSVMHEALHNHYTQKSLSLSPGKIISFFLALTSTALLFLLFFLTLRFSVVKRGRKKLLYIFKQPFMRPVQTTQEEDGCSCRFPEEEEGGCELRVKFSRSADAPAYQQGQNQLYNELNLGRREEYDVLDKRRGRDPEMGGKPRRKNPQEGLYNELQKDKMAEAYSEIGMKGERRRGKGHDGLYQGLSTATKDTYDALHMQALPPR

SEQ ID NO: 8126 - protein, 435 aa, Artificial Sequence
  source: /note="Description of Artificial Sequence: Synthetic Chimeric Antigen Receptor"
QVQLQQPGAELVKPGTSVKLSCKASGYNFTNYWINWVKLRPGQGLEWIGEIYPGSGSTNYNEKFKSKATLTADTSSSTAYMQLSSLASEDSALYYCARDGNYYAMDYWGQGTSVTVSSGGGGSGGGGSGGGGSDIQMTQTTSSLSASLGDRVTITCRASQDINNYLNWYQQKPDGTVKLLIYYTSALHSGVPSRFSGSGSGTDYSLTISNLEQEDIATYFCQQGNTLPPYTFGGGTKLEIKGLAVSTISSFFPPGYQIYIWAPLAGTCGVLLLSLVITLYCKRGRKKLLYIFKQPFMRPVQTTQEEDGCSCRFPEEEEGGCELRVKFSRSADAPAYQQGQNQLYNELNLGRREEYDVLDKRRGRDPEMGGKPRRKNPQEGLYNELQKDKMAEAYSEIGMKGERRRGKGHDGLYQGLSTATKDTYDALHMQALPPR

SEQ ID NO: 8127 - protein, 438 aa, Artificial Sequence
  source: /note="Description of Artificial Sequence: Synthetic Chimeric Antigen Receptor"
QVQLQQPGAELVKPGTSVKLSCKASGYNFTNYWINWVKLRPGQGLEWIGEIYPGSGSTNYNEKFKSKATLTADTSSSTAYMQLSSLASEDSALYYCARDGNYYAMDYWGQGTSVTVSSGGGGSGGGGSGGGGSDIQMTQTTSSLSASLGDRVTITCRASQDINNYLNWYQQKPDGTVKLLIYYTSALHSGVPSRFSGSGSGTDYSLTISNLEQEDIATYFCQQGNTLPPYTFGGGTKLEIKGLAVSTISSFFPPGYQIISFFLALTSTALLFLLFFLTLRFSVVKRGRKKLLYIFKQPFMRPVQTTQEEDGCSCRFPEEEEGGCELRVKFSRSADAPAYQQGQNQLYNELNLGRREEYDVLDKRRGRDPEMGGKPRRKNPQEGLYNELQKDKMAEAYSEIGMKGERRRGKGHDGLYQGLSTATKDTYDALHMQALPPR

SEQ ID NO: 8128 - protein, 464 aa, Artificial Sequence
  source: /note="Description of Artificial Sequence: Synthetic Chimeric Antigen Receptor"
QVQLQQPGAELVKPGTSVKLSCKASGYNFTNYWINWVKLRPGQGLEWIGEIYPGSGSTNYNEKFKSKATLTADTSSSTAYMQLSSLASEDSALYYCARDGNYYAMDYWGQGTSVTVSSGGGGSGGGGSGGGGSDIQMTQTTSSLSASLGDRVTITCRASQDINNYLNWYQQKPDGTVKLLIYYTSALHSGVPSRFSGSGSGTDYSLTISNLEQEDIATYFCQQGNTLPPYTFGGGTKLEIKTTTPAPRPPTPAPTIASQPLSLRPEACRPAAGGAVHTRGLDFACDIYIWAPLAGTCGVLLLSLVITLYCKRGRKKLLYIFKQPFMRPVQTTQEEDGCSCRFPEEEEGGCELRVKFSRSADAPAYQQGQNQLYNELNLGRREEYDVLDKRRGRDPEMGGKPRRKNPQEGLYNELQKDKMAEAYSEIGMKGERRRGKGHDGLYQGLSTATKDTYDALHMQALPPR

SEQ ID NO: 8129 - protein, 467 aa, Artificial Sequence
  source: /note="Description of Artificial Sequence: Synthetic Chimeric Antigen Receptor"
QVQLQQPGAELVKPGTSVKLSCKASGYNFTNYWINWVKLRPGQGLEWIGEIYPGSGSTNYNEKFKSKATLTADTSSSTAYMQLSSLASEDSALYYCARDGNYYAMDYWGQGTSVTVSSGGGGSGGGGSGGGGSDIQMTQTTSSLSASLGDRVTITCRASQDINNYLNWYQQKPDGTVKLLIYYTSALHSGVPSRFSGSGSGTDYSLTISNLEQEDIATYFCQQGNTLPPYTFGGGTKLEIKTTTPAPRPPTPAPTIASQPLSLRPEACRPAAGGAVHTRGLDFACDIISFFLALTSTALLFLLFFLTLRFSVVKRGRKKLLYIFKQPFMRPVQTTQEEDGCSCRFPEEEEGGCELRVKFSRSADAPAYQQGQNQLYNELNLGRREEYDVLDKRRGRDPEMGGKPRRKNPQEGLYNELQKDKMAEAYSEIGMKGERRRGKGHDGLYQGLSTATKDTYDALHMQALPPR

SEQ ID NO: 8130 - protein, 650 aa, Artificial Sequence
  source: /note="Description of Artificial Sequence: Synthetic Chimeric Antigen Receptor"
QVQLQQPGAELVKPGTSVKLSCKASGYNFTNYWINWVKLRPGQGLEWIGEIYPGSGSTNYNEKFKSKATLTADTSSSTAYMQLSSLASEDSALYYCARDGNYYAMDYWGQGTSVTVSSGGGGSGGGGSGGGGSDIQMTQTTSSLSASLGDRVTITCRASQDINNYLNWYQQKPDGTVKLLIYYTSALHSGVPSRFSGSGSGTDYSLTISNLEQEDIATYFCQQGNTLPPYTFGGGTKLEIKEPKSPDKTHTCPPCPAPPVAGPSVFLFPPKPKDTLMIARTPEVTCVVVDVSHEDPEVKFNWYVDGVEVHNAKTKPREEQYNSTYRVVSVLTVLHQDWLNGKEYKCKVSNKALPAPIEKTISKAKGQPREPQVYTLPPSRDELTKNQVSLTCLVKGFYPSDIAVEWESNGQPENNYKTTPPVLDSDGSFFLYSKLTVDKSRWQQGNVFSCSVMHEALHNHYTQKSLSLSPGKIYIWAPLAGTCGVLLLSLVITLYCKRGRKKLLYIFKQPFMRPVQTTQEEDGCSCRFPEEEEGGCELRVKFSRSADAPAYQQGQNQLYNELNLGRREEYDVLDKRRGRDPEMGGKPRRKNPQEGLYNELQKDKMAEAYSEIGMKGERRRGKGHDGLYQGLSTATKDTYDALHMQALPPR

SEQ ID NO: 8131 - protein, 653 aa, Artificial Sequence
  source: /note="Description of Artificial Sequence: Synthetic Chimeric Antigen Receptor"
QVQLQQPGAELVKPGTSVKLSCKASGYNFTNYWINWVKLRPGQGLEWIGEIYPGSGSTNYNEKFKSKATLTADTSSSTAYMQLSSLASEDSALYYCARDGNYYAMDYWGQGTSVTVSSGGGGSGGGGSGGGGSDIQMTQTTSSLSASLGDRVTITCRASQDINNYLNWYQQKPDGTVKLLIYYTSALHSGVPSRFSGSGSGTDYSLTISNLEQEDIATYFCQQGNTLPPYTFGGGTKLEIKEPKSPDKTHTCPPCPAPPVAGPSVFLFPPKPKDTLMIARTPEVTCVVVDVSHEDPEVKFNWYVDGVEVHNAKTKPREEQYNSTYRVVSVLTVLHQDWLNGKEYKCKVSNKALPAPIEKTISKAKGQPREPQVYTLPPSRDELTKNQVSLTCLVKGFYPSDIAVEWESNGQPENNYKTTPPVLDSDGSFFLYSKLTVDKSRWQQGNVFSCSVMHEALHNHYTQKSLSLSPGKIISFFLALTSTALLFLLFFLTLRFSVVKRGRKKLLYIFKQPFMRPVQTTQEEDGCSCRFPEEEEGGCELRVKFSRSADAPAYQQGQNQLYNELNLGRREEYDVLDKRRGRDPEMGGKPRRKNPQEGLYNELQKDKMAEAYSEIGMKGERRRGKGHDGLYQGLSTATKDTYDALHMQALPPR

SEQ ID NO: 8132 - protein, 434 aa, Artificial Sequence
  source: /note="Description of Artificial Sequence: Synthetic Chimeric Antigen Receptor"
EVKLVESGGGLVKPGGSLKLSCAASGFTFSSYAMSWVRQTPEKRLEWVASISTGASAYFPDSVKGRFTISRDNARNILYLQMSSLRSEDTAMYYCARITTSTWYFDVWGAGTTVTVSSGGGGSGGGGSGGGGSDIKMTQSPSSMYASLGERVTITCKASQDINSYLSWFQQKPGKSPKTLIYRANRLVDGVPSRFSGSGSGQDYSLTISSLEYEDMGIYYCLQYDEFPYTFGGGTKLEIKGLAVSTISSFFPPGYQIYIWAPLAGTCGVLLLSLVITLYCKRGRKKLLYIFKQPFMRPVQTTQEEDGCSCRFPEEEEGGCELRVKFSRSADAPAYQQGQNQLYNELNLGRREEYDVLDKRRGRDPEMGGKPRRKNPQEGLYNELQKDKMAEAYSEIGMKGERRRGKGHDGLYQGLSTATKDTYDALHMQALPPR

SEQ ID NO: 8133 - protein, 437 aa, Artificial Sequence
  source: /note="Description of Artificial Sequence: Synthetic Chimeric Antigen Receptor"
EVKLVESGGGLVKPGGSLKLSCAASGFTFSSYAMSWVRQTPEKRLEWVASISTGASAYFPDSVKGRFTISRDNARNILYLQMSSLRSEDTAMYYCARITTSTWYFDVWGAGTTVTVSSGGGGSGGGGSGGGGSDIKMTQSPSSMYASLGERVTITCKASQDINSYLSWFQQKPGKSPKTLIYRANRLVDGVPSRFSGSGSGQDYSLTISSLEYEDMGIYYCLQYDEFPYTFGGGTKLEIKGLAVSTISSFFPPGYQIISFFLALTSTALLFLLFFLTLRFSVVKRGRKKLLYIFKQPFMRPVQTTQEEDGCSCRFPEEEEGGCELRVKFSRSADAPAYQQGQNQLYNELNLGRREEYDVLDKRRGRDPEMGGKPRRKNPQEGLYNELQKDKMAEAYSEIGMKGERRRGKGHDGLYQGLSTATKDTYDALHMQALPPR

SEQ ID NO: 8134 - protein, 463 aa, Artificial Sequence
  source: /note="Description of Artificial Sequence: Synthetic Chimeric Antigen Receptor"
EVKLVESGGGLVKPGGSLKLSCAASGFTFSSYAMSWVRQTPEKRLEWVASISTGASAYFPDSVKGRFTISRDNARNILYLQMSSLRSEDTAMYYCARITTSTWYFDVWGAGTTVTVSSGGGGSGGGGSGGGGSDIKMTQSPSSMYASLGERVTITCKASQDINSYLSWFQQKPGKSPKTLIYRANRLVDGVPSRFSGSGSGQDYSLTISSLEYEDMGIYYCLQYDEFPYTFGGGTKLEIKTTTPAPRPPTPAPTIASQPLSLRPEACRPAAGGAVHTRGLDFACDIYIWAPLAGTCGVLLLSLVITLYCKRGRKKLLYIFKQPFMRPVQTTQEEDGCSCRFPEEEEGGCELRVKFSRSADAPAYQQGQNQLYNELNLGRREEYDVLDKRRGRDPEMGGKPRRKNPQEGLYNELQKDKMAEAYSEIGMKGERRRGKGHDGLYQGLSTATKDTYDALHMQALPPR

SEQ ID NO: 8135 - protein, 466 aa, Artificial Sequence
  source: /note="Description of Artificial Sequence: Synthetic Chimeric Antigen Receptor"
EVKLVESGGGLVKPGGSLKLSCAASGFTFSSYAMSWVRQTPEKRLEWVASISTGASAYFPDSVKGRFTISRDNARNILYLQMSSLRSEDTAMYYCARITTSTWYFDVWGAGTTVTVSSGGGGSGGGGSGGGGSDIKMTQSPSSMYASLGERVTITCKASQDINSYLSWFQQKPGKSPKTLIYRANRLVDGVPSRFSGSGSGQDYSLTISSLEYEDMGIYYCLQYDEFPYTFGGGTKLEIKTTTPAPRPPTPAPTIASQPLSLRPEACRPAAGGAVHTRGLDFACDIISFFLALTSTALLFLLFFLTLRFSVVKRGRKKLLYIFKQPFMRPVQTTQEEDGCSCRFPEEEEGGCELRVKFSRSADAPAYQQGQNQLYNELNLGRREEYDVLDKRRGRDPEMGGKPRRKNPQEGLYNELQKDKMAEAYSEIGMKGERRRGKGHDGLYQGLSTATKDTYDALHMQALPPR

SEQ ID NO: 8136 - protein, 649 aa, Artificial Sequence
  source: /note="Description of Artificial Sequence: Synthetic Chimeric Antigen Receptor"
EVKLVESGGGLVKPGGSLKLSCAASGFTFSSYAMSWVRQTPEKRLEWVASISTGASAYFPDSVKGRFTISRDNARNILYLQMSSLRSEDTAMYYCARITTSTWYFDVWGAGTTVTVSSGGGGSGGGGSGGGGSDIKMTQSPSSMYASLGERVTITCKASQDINSYLSWFQQKPGKSPKTLIYRANRLVDGVPSRFSGSGSGQDYSLTISSLEYEDMGIYYCLQYDEFPYTFGGGTKLEIKEPKSPDKTHTCPPCPAPPVAGPSVFLFPPKPKDTLMIARTPEVTCVVVDVSHEDPEVKFNWYVDGVEVHNAKTKPREEQYNSTYRVVSVLTVLHQDWLNGKEYKCKVSNKALPAPIEKTISKAKGQPREPQVYTLPPSRDELTKNQVSLTCLVKGFYPSDIAVEWESNGQPENNYKTTPPVLDSDGSFFLYSKLTVDKSRWQQGNVFSCSVMHEALHNHYTQKSLSLSPGKIYIWAPLAGTCGVLLLSLVITLYCKRGRKKLLYIFKQPFMRPVQTTQEEDGCSCRFPEEEEGGCELRVKFSRSADAPAYQQGQNQLYNELNLGRREEYDVLDKRRGRDPEMGGKPRRKNPQEGLYNELQKDKMAEAYSEIGMKGERRRGKGHDGLYQGLSTATKDTYDALHMQALPPR

SEQ ID NO: 8137 - protein, 652 aa, Artificial Sequence
  source: /note="Description of Artificial Sequence: Synthetic Chimeric Antigen Receptor"
EVKLVESGGGLVKPGGSLKLSCAASGFTFSSYAMSWVRQTPEKRLEWVASISTGASAYFPDSVKGRFTISRDNARNILYLQMSSLRSEDTAMYYCARITTSTWYFDVWGAGTTVTVSSGGGGSGGGGSGGGGSDIKMTQSPSSMYASLGERVTITCKASQDINSYLSWFQQKPGKSPKTLIYRANRLVDGVPSRFSGSGSGQDYSLTISSLEYEDMGIYYCLQYDEFPYTFGGGTKLEIKEPKSPDKTHTCPPCPAPPVAGPSVFLFPPKPKDTLMIARTPEVTCVVVDVSHEDPEVKFNWYVDGVEVHNAKTKPREEQYNSTYRVVSVLTVLHQDWLNGKEYKCKVSNKALPAPIEKTISKAKGQPREPQVYTLPPSRDELTKNQVSLTCLVKGFYPSDIAVEWESNGQPENNYKTTPPVLDSDGSFFLYSKLTVDKSRWQQGNVFSCSVMHEALHNHYTQKSLSLSPGKIISFFLALTSTALLFLLFFLTLRFSVVKRGRKKLLYIFKQPFMRPVQTTQEEDGCSCRFPEEEEGGCELRVKFSRSADAPAYQQGQNQLYNELNLGRREEYDVLDKRRGRDPEMGGKPRRKNPQEGLYNELQKDKMAEAYSEIGMKGERRRGKGHDGLYQGLSTATKDTYDALHMQALPPR

SEQ ID NO: 8138 - protein, 430 aa, Artificial Sequence
  source: /note="Description of Artificial Sequence: Synthetic Chimeric Antigen Receptor"
EVKLQQSGPELVKPGASVKISCKTSGYTFTEYTMHWVKQSHGKSLEWIGGINPNNGGTSYNQKFKGKATLTVDKSSSTAYMELRSLTSEDSAVYYCALQGFAYWGQGTPLTVSSGGGGSGGGGSGGGGSMEIEITQTPALMSASPGEKVTMTCSASSSVSYMYWYQQKPRSSPKPWIYLTSNLASGVPARFSGSGSGTSYSLTISSMEAEDAATYYCQQWSSNPYTFGGGTRLELKGLAVSTISSFFPPGYQIYIWAPLAGTCGVLLLSLVITLYCKRGRKKLLYIFKQPFMRPVQTTQEEDGCSCRFPEEEEGGCELRVKFSRSADAPAYQQGQNQLYNELNLGRREEYDVLDKRRGRDPEMGGKPRRKNPQEGLYNELQKDKMAEAYSEIGMKGERRRGKGHDGLYQGLSTATKDTYDALHMQALPPR

SEQ ID NO: 8139 - protein, 433 aa, Artificial Sequence
  source: /note="Description of Artificial Sequence: Synthetic Chimeric Antigen Receptor"
EVKLQQSGPELVKPGASVKISCKTSGYTFTEYTMHWVKQSHGKSLEWIGGINPNNGGTSYNQKFKGKATLTVDKSSSTAYMELRSLTSEDSAVYYCALQGFAYWGQGTPLTVSSGGGGSGGGGSGGGGSMEIEITQTPALMSASPGEKVTMTCSASSSVSYMYWYQQKPRSSPKPWIYLTSNLASGVPARFSGSGSGTSYSLTISSMEAEDAATYYCQQWSSNPYTFGGGTRLELKGLAVSTISSFFPPGYQIISFFLALTSTALLFLLFFLTLRFSVVKRGRKKLLYIFKQPFMRPVQTTQEEDGCSCRFPEEEEGGCELRVKFSRSADAPAYQQGQNQLYNELNLGRREEYDVLDKRRGRDPEMGGKPRRKNPQEGLYNELQKDKMAEAYSEIGMKGERRRGKGHDGLYQGLSTATKDTYDALHMQALPPR

SEQ ID NO: 8140 - protein, 459 aa, Artificial Sequence
  source: /note="Description of Artificial Sequence: Synthetic Chimeric Antigen Receptor"
EVKLQQSGPELVKPGASVKISCKTSGYTFTEYTMHWVKQSHGKSLEWIGGINPNNGGTSYNQKFKGKATLTVDKSSSTAYMELRSLTSEDSAVYYCALQGFAYWGQGTPLTVSSGGGGSGGGGSGGGGSMEIEITQTPALMSASPGEKVTMTCSASSSVSYMYWYQQKPRSSPKPWIYLTSNLASGVPARFSGSGSGTSYSLTISSMEAEDAATYYCQQWSSNPYTFGGGTRLELKTTTPAPRPPTPAPTIASQPLSLRPEACRPAAGGAVHTRGLDFACDIYIWAPLAGTCGVLLLSLVITLYCKRGRKKLLYIFKQPFMRPVQTTQEEDGCSCRFPEEEEGGCELRVKFSRSADAPAYQQGQNQLYNELNLGRREEYDVLDKRRGRDPEMGGKPRRKNPQEGLYNELQKDKMAEAYSEIGMKGERRRGKGHDGLYQGLSTATKDTYDALHMQALPPR

SEQ ID NO: 8141 - protein, 462 aa, Artificial Sequence
  source: /note="Description of Artificial Sequence: Synthetic Chimeric Antigen Receptor"
EVKLQQSGPELVKPGASVKISCKTSGYTFTEYTMHWVKQSHGKSLEWIGGINPNNGGTSYNQKFKGKATLTVDKSSSTAYMELRSLTSEDSAVYYCALQGFAYWGQGTPLTVSSGGGGSGGGGSGGGGSMEIEITQTPALMSASPGEKVTMTCSASSSVSYMYWYQQKPRSSPKPWIYLTSNLASGVPARFSGSGSGTSYSLTISSMEAEDAATYYCQQWSSNPYTFGGGTRLELKTTTPAPRPPTPAPTIASQPLSLRPEACRPAAGGAVHTRGLDFACDIISFFLALTSTALLFLLFFLTLRFSVVKRGRKKLLYIFKQPFMRPVQTTQEEDGCSCRFPEEEEGGCELRVKFSRSADAPAYQQGQNQLYNELNLGRREEYDVLDKRRGRDPEMGGKPRRKNPQEGLYNELQKDKMAEAYSEIGMKGERRRGKGHDGLYQGLSTATKDTYDALHMQALPPR

SEQ ID NO: 8142 - protein, 645 aa, Artificial Sequence
  source: /note="Description of Artificial Sequence: Synthetic Chimeric Antigen Receptor"
EVKLQQSGPELVKPGASVKISCKTSGYTFTEYTMHWVKQSHGKSLEWIGGINPNNGGTSYNQKFKGKATLTVDKSSSTAYMELRSLTSEDSAVYYCALQGFAYWGQGTPLTVSSGGGGSGGGGSGGGGSMEIEITQTPALMSASPGEKVTMTCSASSSVSYMYWYQQKPRSSPKPWIYLTSNLASGVPARFSGSGSGTSYSLTISSMEAEDAATYYCQQWSSNPYTFGGGTRLELKEPKSPDKTHTCPPCPAPPVAGPSVFLFPPKPKDTLMIARTPEVTCVVVDVSHEDPEVKFNWYVDGVEVHNAKTKPREEQYNSTYRVVSVLTVLHQDWLNGKEYKCKVSNKALPAPIEKTISKAKGQPREPQVYTLPPSRDELTKNQVSLTCLVKGFYPSDIAVEWESNGQPENNYKTTPPVLDSDGSFFLYSKLTVDKSRWQQGNVFSCSVMHEALHNHYTQKSLSLSPGKIYIWAPLAGTCGVLLLSLVITLYCKRGRKKLLYIFKQPFMRPVQTTQEEDGCSCRFPEEEEGGCELRVKFSRSADAPAYQQGQNQLYNELNLGRREEYDVLDKRRGRDPEMGGKPRRKNPQEGLYNELQKDKMAEAYSEIGMKGERRRGKGHDGLYQGLSTATKDTYDALHMQALPPR

SEQ ID NO: 8143 - protein, 648 aa, Artificial Sequence
  source: /note="Description of Artificial Sequence: Synthetic Chimeric Antigen Receptor"
EVKLQQSGPELVKPGASVKISCKTSGYTFTEYTMHWVKQSHGKSLEWIGGINPNNGGTSYNQKFKGKATLTVDKSSSTAYMELRSLTSEDSAVYYCALQGFAYWGQGTPLTVSSGGGGSGGGGSGGGGSMEIEITQTPALMSASPGEKVTMTCSASSSVSYMYWYQQKPRSSPKPWIYLTSNLASGVPARFSGSGSGTSYSLTISSMEAEDAATYYCQQWSSNPYTFGGGTRLELKEPKSPDKTHTCPPCPAPPVAGPSVFLFPPKPKDTLMIARTPEVTCVVVDVSHEDPEVKFNWYVDGVEVHNAKTKPREEQYNSTYRVVSVLTVLHQDWLNGKEYKCKVSNKALPAPIEKTISKAKGQPREPQVYTLPPSRDELTKNQVSLTCLVKGFYPSDIAVEWESNGQPENNYKTTPPVLDSDGSFFLYSKLTVDKSRWQQGNVFSCSVMHEALHNHYTQKSLSLSPGKIISFFLALTSTALLFLLFFLTLRFSVVKRGRKKLLYIFKQPFMRPVQTTQEEDGCSCRFPEEEEGGCELRVKFSRSADAPAYQQGQNQLYNELNLGRREEYDVLDKRRGRDPEMGGKPRRKNPQEGLYNELQKDKMAEAYSEIGMKGERRRGKGHDGLYQGLSTATKDTYDALHMQALPPR

SEQ ID NO: 8144 - protein, 436 aa, Artificial Sequence
  source: /note="Description of Artificial Sequence: Synthetic Chimeric Antigen Receptor"
EVKLQESGAELARPGASVKMSCKASGYTFTSYTMHWVKQRPGQGLEWIGYINPSSGYTEYNQKFKDKTTLTADKSSSTAYMQLSSLTSGDSAVYYCARRVLWLRRGDYWGQGTILTVSAGGGGSGGGGSGGGGSMEVLITQTPSSLSASLGERVSLTCRASQDIGSSLNWLQQEPDGTIKRLIYATSSLDSGVPKRFSGSRSGSDYSLTISSLESEDFVDYYCLQYASSPYTFGGGTKLELKGLAVSTISSFFPPGYQIYIWAPLAGTCGVLLLSLVITLYCKRGRKKLLYIFKQPFMRPVQTTQEEDGCSCRFPEEEEGGCELRVKFSRSADAPAYQQGQNQLYNELNLGRREEYDVLDKRRGRDPEMGGKPRRKNPQEGLYNELQKDKMAEAYSEIGMKGERRRGKGHDGLYQGLSTATKDTYDALHMQALPPR

SEQ ID NO: 8145 - protein, 439 aa, Artificial Sequence
  source: /note="Description of Artificial Sequence: Synthetic Chimeric Antigen Receptor"
EVKLQESGAELARPGASVKMSCKASGYTFTSYTMHWVKQRPGQGLEWIGYINPSSGYTEYNQKFKDKTTLTADKSSSTAYMQLSSLTSGDSAVYYCARRVLWLRRGDYWGQGTILTVSAGGGGSGGGGSGGGGSMEVLITQTPSSLSASLGERVSLTCRASQDIGSSLNWLQQEPDGTIKRLIYATSSLDSGVPKRFSGSRSGSDYSLTISSLESEDFVDYYCLQYASSPYTFGGGTKLELKGLAVSTISSFFPPGYQIISFFLALTSTALLFLLFFLTLRFSVVKRGRKKLLYIFKQPFMRPVQTTQEEDGCSCRFPEEEEGGCELRVKFSRSADAPAYQQGQNQLYNELNLGRREEYDVLDKRRGRDPEMGGKPRRKNPQEGLYNELQKDKMAEAYSEIGMKGERRRGKGHDGLYQGLSTATKDTYDALHMQALPPR

SEQ ID NO: 8146 - protein, 486 aa, Artificial Sequence
  source: /note="Description of Artificial Sequence: Synthetic Chimeric Antigen Receptor"
MALPVTALLLPLALLLHAARPEVKLQESGAELARPGASVKMSCKASGYTFTSYTMHWVKQRPGQGLEWIGYINPSSGYTEYNQKFKDKTTLTADKSSSTAYMQLSSLTSGDSAVYYCARRVLWLRRGDYWGQGTILTVSAGGGGSGGGGSGGGGSMEVLITQTPSSLSASLGERVSLTCRASQDIGSSLNWLQQEPDGTIKRLIYATSSLDSGVPKRFSGSRSGSDYSLTISSLESEDFVDYYCLQYASSPYTFGGGTKLELKTTTPAPRPPTPAPTIASQPLSLRPEACRPAAGGAVHTRGLDFACDIYIWAPLAGTCGVLLLSLVITLYCKRGRKKLLYIFKQPFMRPVQTTQEEDGCSCRFPEEEEGGCELRVKFSRSADAPAYQQGQNQLYNELNLGRREEYDVLDKRRGRDPEMGGKPRRKNPQEGLYNELQKDKMAEAYSEIGMKGERRRGKGHDGLYQGLSTATKDTYDALHMQALPPR

SEQ ID NO: 8147 - protein, 468 aa, Artificial Sequence
  source: /note="Description of Artificial Sequence: Synthetic Chimeric Antigen Receptor"
EVKLQESGAELARPGASVKMSCKASGYTFTSYTMHWVKQRPGQGLEWIGYINPSSGYTEYNQKFKDKTTLTADKSSSTAYMQLSSLTSGDSAVYYCARRVLWLRRGDYWGQGTILTVSAGGGGSGGGGSGGGGSMEVLITQTPSSLSASLGERVSLTCRASQDIGSSLNWLQQEPDGTIKRLIYATSSLDSGVPKRFSGSRSGSDYSLTISSLESEDFVDYYCLQYASSPYTFGGGTKLELKTTTPAPRPPTPAPTIASQPLSLRPEACRPAAGGAVHTRGLDFACDIISFFLALTSTALLFLLFFLTLRFSVVKRGRKKLLYIFKQPFMRPVQTTQEEDGCSCRFPEEEEGGCELRVKFSRSADAPAYQQGQNQLYNELNLGRREEYDVLDKRRGRDPEMGGKPRRKNPQEGLYNELQKDKMAEAYSEIGMKGERRRGKGHDGLYQGLSTATKDTYDALHMQALPPR

SEQ ID NO: 8148 - protein, 651 aa, Artificial Sequence
  source: /note="Description of Artificial Sequence: Synthetic Chimeric Antigen Receptor"
EVKLQESGAELARPGASVKMSCKASGYTFTSYTMHWVKQRPGQGLEWIGYINPSSGYTEYNQKFKDKTTLTADKSSSTAYMQLSSLTSGDSAVYYCARRVLWLRRGDYWGQGTILTVSAGGGGSGGGGSGGGGSMEVLITQTPSSLSASLGERVSLTCRASQDIGSSLNWLQQEPDGTIKRLIYATSSLDSGVPKRFSGSRSGSDYSLTISSLESEDFVDYYCLQYASSPYTFGGGTKLELKEPKSPDKTHTCPPCPAPPVAGPSVFLFPPKPKDTLMIARTPEVTCVVVDVSHEDPEVKFNWYVDGVEVHNAKTKPREEQYNSTYRVVSVLTVLHQDWLNGKEYKCKVSNKALPAPIEKTISKAKGQPREPQVYTLPPSRDELTKNQVSLTCLVKGFYPSDIAVEWESNGQPENNYKTTPPVLDSDGSFFLYSKLTVDKSRWQQGNVFSCSVMHEALHNHYTQKSLSLSPGKIYIWAPLAGTCGVLLLSLVITLYCKRGRKKLLYIFKQPFMRPVQTTQEEDGCSCRFPEEEEGGCELRVKFSRSADAPAYQQGQNQLYNELNLGRREEYDVLDKRRGRDPEMGGKPRRKNPQEGLYNELQKDKMAEAYSEIGMKGERRRGKGHDGLYQGLSTATKDTYDALHMQALPPR

SEQ ID NO: 8149 - protein, 654 aa, Artificial Sequence
  source: /note="Description of Artificial Sequence: Synthetic Chimeric Antigen Receptor"
EVKLQESGAELARPGASVKMSCKASGYTFTSYTMHWVKQRPGQGLEWIGYINPSSGYTEYNQKFKDKTTLTADKSSSTAYMQLSSLTSGDSAVYYCARRVLWLRRGDYWGQGTILTVSAGGGGSGGGGSGGGGSMEVLITQTPSSLSASLGERVSLTCRASQDIGSSLNWLQQEPDGTIKRLIYATSSLDSGVPKRFSGSRSGSDYSLTISSLESEDFVDYYCLQYASSPYTFGGGTKLELKEPKSPDKTHTCPPCPAPPVAGPSVFLFPPKPKDTLMIARTPEVTCVVVDVSHEDPEVKFNWYVDGVEVHNAKTKPREEQYNSTYRVVSVLTVLHQDWLNGKEYKCKVSNKALPAPIEKTISKAKGQPREPQVYTLPPSRDELTKNQVSLTCLVKGFYPSDIAVEWESNGQPENNYKTTPPVLDSDGSFFLYSKLTVDKSRWQQGNVFSCSVMHEALHNHYTQKSLSLSPGKIISFFLALTSTALLFLLFFLTLRFSVVKRGRKKLLYIFKQPFMRPVQTTQEEDGCSCRFPEEEEGGCELRVKFSRSADAPAYQQGQNQLYNELNLGRREEYDVLDKRRGRDPEMGGKPRRKNPQEGLYNELQKDKMAEAYSEIGMKGERRRGKGHDGLYQGLSTATKDTYDALHMQALPPR

SEQ ID NO: 8150 - protein, 454 aa, Artificial Sequence
  source: /note="Description of Artificial Sequence: Synthetic Chimeric Antigen Receptor"
MALPVTALLLPLALLLHAARPQVQLQESGPGLVKPSETLSLTCTVSGFSLTSYGYVHWVRQPPGKGLEWLGVIWAGGFTNYNPSLKSRLTISKDNSKNQVSLKLSSVTAADTAVYYCARRGSSYSMDYWGQGTLVTVSSGGGGSGGGGSGGGGSEIVLTQSPATLSLSPGERATLSCRASSNVSYIHWYQQKPGQAPRPWIYEISKLATGIPARFSGSGSGTDYTLTISSLEPEDFAVYYCQQWNYPLITFGQGTKLEIKGLAVSTISSFFPPGYQIYIWAPLAGTCGVLLLSLVITLYCKRGRKKLLYIFKQPFMRPVQTTQEEDGCSCRFPEEEEGGCELRVKFSRSADAPAYQQGQNQLYNELNLGRREEYDVLDKRRGRDPEMGGKPRRKNPQEGLYNELQKDKMAEAYSEIGMKGERRRGKGHDGLYQGLSTATKDTYDALHMQALPPR

SEQ ID NO: 8151 - protein, 457 aa, Artificial Sequence
  source: /note="Description of Artificial Sequence: Synthetic Chimeric Antigen Receptor"
MALPVTALLLPLALLLHAARPQVQLQESGPGLVKPSETLSLTCTVSGFSLTSYGYVHWVRQPPGKGLEWLGVIWAGGFTNYNPSLKSRLTISKDNSKNQVSLKLSSVTAADTAVYYCARRGSSYSMDYWGQGTLVTVSSGGGGSGGGGSGGGGSEIVLTQSPATLSLSPGERATLSCRASSNVSYIHWYQQKPGQAPRPWIYEISKLATGIPARFSGSGSGTDYTLTISSLEPEDFAVYYCQQWNYPLITFGQGTKLEIKGLAVSTISSFFPPGYQIISFFLALTSTALLFLLFFLTLRFSVVKRGRKKLLYIFKQPFMRPVQTTQEEDGCSCRFPEEEEGGCELRVKFSRSADAPAYQQGQNQLYNELNLGRREEYDVLDKRRGRDPEMGGKPRRKNPQEGLYNELQKDKMAEAYSEIGMKGERRRGKGHDGLYQGLSTATKDTYDALHMQALPPR

SEQ ID NO: 8152 - protein, 483 aa, Artificial Sequence
  source: /note="Description of Artificial Sequence: Synthetic Chimeric Antigen Receptor"
MALPVTALLLPLALLLHAARPQVQLQESGPGLVKPSETLSLTCTVSGFSLTSYGYVHWVRQPPGKGLEWLGVIWAGGFTNYNPSLKSRLTISKDNSKNQVSLKLSSVTAADTAVYYCARRGSSYSMDYWGQGTLVTVSSGGGGSGGGGSGGGGSEIVLTQSPATLSLSPGERATLSCRASSNVSYIHWYQQKPGQAPRPWIYEISKLATGIPARFSGSGSGTDYTLTISSLEPEDFAVYYCQQWNYPLITFGQGTKLEIKTTTPAPRPPTPAPTIASQPLSLRPEACRPAAGGAVHTRGLDFACDIYIWAPLAGTCGVLLLSLVITLYCKRGRKKLLYIFKQPFMRPVQTTQEEDGCSCRFPEEEEGGCELRVKFSRSADAPAYQQGQNQLYNELNLGRREEYDVLDKRRGRDPEMGGKPRRKNPQEGLYNELQKDKMAEAYSEIGMKGERRRGKGHDGLYQGLSTATKDTYDALHMQALPPR

SEQ ID NO: 8153 - protein, 486 aa, Artificial Sequence
  source: /note="Description of Artificial Sequence: Synthetic Chimeric Antigen Receptor"
MALPVTALLLPLALLLHAARPQVQLQESGPGLVKPSETLSLTCTVSGFSLTSYGYVHWVRQPPGKGLEWLGVIWAGGFTNYNPSLKSRLTISKDNSKNQVSLKLSSVTAADTAVYYCARRGSSYSMDYWGQGTLVTVSSGGGGSGGGGSGGGGSEIVLTQSPATLSLSPGERATLSCRASSNVSYIHWYQQKPGQAPRPWIYEISKLATGIPARFSGSGSGTDYTLTISSLEPEDFAVYYCQQWNYPLITFGQGTKLEIKTTTPAPRPPTPAPTIASQPLSLRPEACRPAAGGAVHTRGLDFACDIISFFLALTSTALLFLLFFLTLRFSVVKRGRKKLLYIFKQPFMRPVQTTQEEDGCSCRFPEEEEGGCELRVKFSRSADAPAYQQGQNQLYNELNLGRREEYDVLDKRRGRDPEMGGKPRRKNPQEGLYNELQKDKMAEAYSEIGMKGERRRGKGHDGLYQGLSTATKDTYDALHMQALPPR

SEQ ID NO: 8154 - protein, 669 aa, Artificial Sequence
  source: /note="Description of Artificial Sequence: Synthetic Chimeric Antigen Receptor"
MALPVTALLLPLALLLHAARPQVQLQESGPGLVKPSETLSLTCTVSGFSLTSYGYVHWVRQPPGKGLEWLGVIWAGGFTNYNPSLKSRLTISKDNSKNQVSLKLSSVTAADTAVYYCARRGSSYSMDYWGQGTLVTVSSGGGGSGGGGSGGGGSEIVLTQSPATLSLSPGERATLSCRASSNVSYIHWYQQKPGQAPRPWIYEISKLATGIPARFSGSGSGTDYTLTISSLEPEDFAVYYCQQWNYPLITFGQGTKLEIKEPKSPDKTHTCPPCPAPPVAGPSVFLFPPKPKDTLMIARTPEVTCVVVDVSHEDPEVKFNWYVDGVEVHNAKTKPREEQYNSTYRVVSVLTVLHQDWLNGKEYKCKVSNKALPAPIEKTISKAKGQPREPQVYTLPPSRDELTKNQVSLTCLVKGFYPSDIAVEWESNGQPENNYKTTPPVLDSDGSFFLYSKLTVDKSRWQQGNVFSCSVMHEALHNHYTQKSLSLSPGKIYIWAPLAGTCGVLLLSLVITLYCKRGRKKLLYIFKQPFMRPVQTTQEEDGCSCRFPEEEEGGCELRVKFSRSADAPAYQQGQNQLYNELNLGRREEYDVLDKRRGRDPEMGGKPRRKNPQEGLYNELQKDKMAEAYSEIGMKGERRRGKGHDGLYQGLSTATKDTYDALHMQALPPR

SEQ ID NO: 8155 - protein, 672 aa, Artificial Sequence
  source: /note="Description of Artificial Sequence: Synthetic Chimeric Antigen Receptor"
MALPVTALLLPLALLLHAARPQVQLQESGPGLVKPSETLSLTCTVSGFSLTSYGYVHWVRQPPGKGLEWLGVIWAGGFTNYNPSLKSRLTISKDNSKNQVSLKLSSVTAADTAVYYCARRGSSYSMDYWGQGTLVTVSSGGGGSGGGGSGGGGSEIVLTQSPATLSLSPGERATLSCRASSNVSYIHWYQQKPGQAPRPWIYEISKLATGIPARFSGSGSGTDYTLTISSLEPEDFAVYYCQQWNYPLITFGQGTKLEIKEPKSPDKTHTCPPCPAPPVAGPSVFLFPPKPKDTLMIARTPEVTCVVVDVSHEDPEVKFNWYVDGVEVHNAKTKPREEQYNSTYRVVSVLTVLHQDWLNGKEYKCKVSNKALPAPIEKTISKAKGQPREPQVYTLPPSRDELTKNQVSLTCLVKGFYPSDIAVEWESNGQPENNYKTTPPVLDSDGSFFLYSKLTVDKSRWQQGNVFSCSVMHEALHNHYTQKSLSLSPGKIISFFLALTSTALLFLLFFLTLRFSVVKRGRKKLLYIFKQPFMRPVQTTQEEDGCSCRFPEEEEGGCELRVKFSRSADAPAYQQGQNQLYNELNLGRREEYDVLDKRRGRDPEMGGKPRRKNPQEGLYNELQKDKMAEAYSEIGMKGERRRGKGHDGLYQGLSTATKDTYDALHMQALPPR

SEQ ID NO: 8156 - protein, 455 aa, Artificial Sequence
  source: /note="Description of Artificial Sequence: Synthetic Chimeric Antigen Receptor"
MALPVTALLLPLALLLHAARPEVQLVESGGGLVKPGGSLRLSCAASGFTFSSYAMSWVRQAPGKGLEWVASISTGASAYFADSVKGRFTISRDNAKNSLYLQMNSLRAEDTAVYYCARITTSTWYFDVWGQGTTVTVSSGGGGSGGGGSGGGGSDIQMTQSPSSLSASVGDRVTITCRASQDINSYLSWFQQKPGKAPKTLIYRANRLQSGVPSRFSGSGSGQDYTLTISSLQPEDFATYYCLQYDEFPYTFGQGTKLEIKGLAVSTISSFFPPGYQIYIWAPLAGTCGVLLLSLVITLYCKRGRKKLLYIFKQPFMRPVQTTQEEDGCSCRFPEEEEGGCELRVKFSRSADAPAYQQGQNQLYNELNLGRREEYDVLDKRRGRDPEMGGKPRRKNPQEGLYNELQKDKMAEAYSEIGMKGERRRGKGHDGLYQGLSTATKDTYDALHMQALPPR

SEQ ID NO: 8157 - protein, 458 aa, Artificial Sequence
  source: /note="Description of Artificial Sequence: Synthetic Chimeric Antigen Receptor"
MALPVTALLLPLALLLHAARPEVQLVESGGGLVKPGGSLRLSCAASGFTFSSYAMSWVRQAPGKGLEWVASISTGASAYFADSVKGRFTISRDNAKNSLYLQMNSLRAEDTAVYYCARITTSTWYFDVWGQGTTVTVSSGGGGSGGGGSGGGGSDIQMTQSPSSLSASVGDRVTITCRASQDINSYLSWFQQKPGKAPKTLIYRANRLQSGVPSRFSGSGSGQDYTLTISSLQPEDFATYYCLQYDEFPYTFGQGTKLEIKGLAVSTISSFFPPGYQIISFFLALTSTALLFLLFFLTLRFSVVKRGRKKLLYIFKQPFMRPVQTTQEEDGCSCRFPEEEEGGCELRVKFSRSADAPAYQQGQNQLYNELNLGRREEYDVLDKRRGRDPEMGGKPRRKNPQEGLYNELQKDKMAEAYSEIGMKGERRRGKGHDGLYQGLSTATKDTYDALHMQALPPR

SEQ ID NO: 8158 - protein, 484 aa, Artificial Sequence
  source: /note="Description of Artificial Sequence: Synthetic Chimeric Antigen Receptor"
MALPVTALLLPLALLLHAARPEVQLVESGGGLVKPGGSLRLSCAASGFTFSSYAMSWVRQAPGKGLEWVASISTGASAYFADSVKGRFTISRDNAKNSLYLQMNSLRAEDTAVYYCARITTSTWYFDVWGQGTTVTVSSGGGGSGGGGSGGGGSDIQMTQSPSSLSASVGDRVTITCRASQDINSYLSWFQQKPGKAPKTLIYRANRLQSGVPSRFSGSGSGQDYTLTISSLQPEDFATYYCLQYDEFPYTFGQGTKLEIKTTTPAPRPPTPAPTIASQPLSLRPEACRPAAGGAVHTRGLDFACDIYIWAPLAGTCGVLLLSLVITLYCKRGRKKLLYIFKQPFMRPVQTTQEEDGCSCRFPEEEEGGCELRVKFSRSADAPAYQQGQNQLYNELNLGRREEYDVLDKRRGRDPEMGGKPRRKNPQEGLYNELQKDKMAEAYSEIGMKGERRRGKGHDGLYQGLSTATKDTYDALHMQALPPR

SEQ ID NO: 8159 - protein, 487 aa, Artificial Sequence
  source: /note="Description of Artificial Sequence: Synthetic Chimeric Antigen Receptor"
MALPVTALLLPLALLLHAARPEVQLVESGGGLVKPGGSLRLSCAASGFTFSSYAMSWVRQAPGKGLEWVASISTGASAYFADSVKGRFTISRDNAKNSLYLQMNSLRAEDTAVYYCARITTSTWYFDVWGQGTTVTVSSGGGGSGGGGSGGGGSDIQMTQSPSSLSASVGDRVTITCRASQDINSYLSWFQQKPGKAPKTLIYRANRLQSGVPSRFSGSGSGQDYTLTISSLQPEDFATYYCLQYDEFPYTFGQGTKLEIKTTTPAPRPPTPAPTIASQPLSLRPEACRPAAGGAVHTRGLDFACDIISFFLALTSTALLFLLFFLTLRFSVVKRGRKKLLYIFKQPFMRPVQTTQEEDGCSCRFPEEEEGGCELRVKFSRSADAPAYQQGQNQLYNELNLGRREEYDVLDKRRGRDPEMGGKPRRKNPQEGLYNELQKDKMAEAYSEIGMKGERRRGKGHDGLYQGLSTATKDTYDALHMQALPPR

SEQ ID NO: 8160 - protein, 670 aa, Artificial Sequence
  source: /note="Description of Artificial Sequence: Synthetic Chimeric Antigen Receptor"
MALPVTALLLPLALLLHAARPEVQLVESGGGLVKPGGSLRLSCAASGFTFSSYAMSWVRQAPGKGLEWVASISTGASAYFADSVKGRFTISRDNAKNSLYLQMNSLRAEDTAVYYCARITTSTWYFDVWGQGTTVTVSSGGGGSGGGGSGGGGSDIQMTQSPSSLSASVGDRVTITCRASQDINSYLSWFQQKPGKAPKTLIYRANRLQSGVPSRFSGSGSGQDYTLTISSLQPEDFATYYCLQYDEFPYTFGQGTKLEIKEPKSPDKTHTCPPCPAPPVAGPSVFLFPPKPKDTLMIARTPEVTCVVVDVSHEDPEVKFNWYVDGVEVHNAKTKPREEQYNSTYRVVSVLTVLHQDWLNGKEYKCKVSNKALPAPIEKTISKAKGQPREPQVYTLPPSRDELTKNQVSLTCLVKGFYPSDIAVEWESNGQPENNYKTTPPVLDSDGSFFLYSKLTVDKSRWQQGNVFSCSVMHEALHNHYTQKSLSLSPGKIYIWAPLAGTCGVLLLSLVITLYCKRGRKKLLYIFKQPFMRPVQTTQEEDGCSCRFPEEEEGGCELRVKFSRSADAPAYQQGQNQLYNELNLGRREEYDVLDKRRGRDPEMGGKPRRKNPQEGLYNELQKDKMAEAYSEIGMKGERRRGKGHDGLYQGLSTATKDTYDALHMQALPPR

SEQ ID NO: 8161 - protein, 673 aa, Artificial Sequence
  source: /note="Description of Artificial Sequence: Synthetic Chimeric Antigen Receptor"
MALPVTALLLPLALLLHAARPEVQLVESGGGLVKPGGSLRLSCAASGFTFSSYAMSWVRQAPGKGLEWVASISTGASAYFADSVKGRFTISRDNAKNSLYLQMNSLRAEDTAVYYCARITTSTWYFDVWGQGTTVTVSSGGGGSGGGGSGGGGSDIQMTQSPSSLSASVGDRVTITCRASQDINSYLSWFQQKPGKAPKTLIYRANRLQSGVPSRFSGSGSGQDYTLTISSLQPEDFATYYCLQYDEFPYTFGQGTKLEIKEPKSPDKTHTCPPCPAPPVAGPSVFLFPPKPKDTLMIARTPEVTCVVVDVSHEDPEVKFNWYVDGVEVHNAKTKPREEQYNSTYRVVSVLTVLHQDWLNGKEYKCKVSNKALPAPIEKTISKAKGQPREPQVYTLPPSRDELTKNQVSLTCLVKGFYPSDIAVEWESNGQPENNYKTTPPVLDSDGSFFLYSKLTVDKSRWQQGNVFSCSVMHEALHNHYTQKSLSLSPGKIISFFLALTSTALLFLLFFLTLRFSVVKRGRKKLLYIFKQPFMRPVQTTQEEDGCSCRFPEEEEGGCELRVKFSRSADAPAYQQGQNQLYNELNLGRREEYDVLDKRRGRDPEMGGKPRRKNPQEGLYNELQKDKMAEAYSEIGMKGERRRGKGHDGLYQGLSTATKDTYDALHMQALPPR

SEQ ID NO: 8162 - protein, 346 aa, Artificial Sequence
  source: /note="Description of Artificial Sequence: Synthetic Chimeric Antigen Receptor"
MDKDCEMKRTTLDSPLGKLELSGCEQGLHRIIFLGKGTSAADAVEVPAPAAVLGGPEPLMQATAWLNAYFHQPEAIEEFPVPALHHPVFQQESFTRQVLWKLLKVVKFGEVISYSHLAALAGNPAATAAVKTALSGNPVPILIPCHRVVQGDLDVGGYEGGLAVKEWLLAHEGHRLGKPGLGGGGGSGGGGSKRGRKKLLYIFKQPFMRPVQTTQEEDGCSCRFPEEEEGGCELRVKFSRSADAPAYKQGQNQLYNELNLGRREEYDVLDKRRGRDPEMGGKPRRKNPQEGLYNELQKDKMAEAYSEIGMKGERRRGKGHDGLYQGLSTATKDTYDALHMQALPPR

SEQ ID NO: 8163 - protein, 497 aa, Artificial Sequence
  source: /note="Description of Artificial Sequence: Synthetic Chimeric Antigen Receptor"
MALPVTALLLPLALLLHAARPEIVMTQSPATLSVSPGERATLSCRASQSVSSNLAWYQQKPGQAPRLLIYGASTRATGIPARFSGSGSGTEFTLTISSLQSEDFAVYYCQQYNNWPPYTFGQGTKVEIKRGGGGSGGGGSGGGGSQVTLKESGPTLVKPTQTLTLTCTFSGFSLNSFGVAVGWFRQPPGKALEWLGLIYWDDDRRYFPSLEGRLSITKDASDNNVVLTMMNVDPADTATYYCARTSPMVQGIANYYAMDVWGQGTTVTVSSAAATTTPAPRPPTPAPTIASQPLSLRPEACRPAAGGAVHTRGLDFACDIYIWAPLAGTCGVLLLSLVITLYCKRGRKKLLYIFKQPFMRPVQTTQEEDGCSCRFPEEEEGGCELRVKFSRSADAPAYQQGQNQLYNELNLGRREEYDVLDKRRGRDPEMGGKPRRKNPQEGLYNELQKDKMAEAYSEIGMKGERRRGKGHDGLYQGLSTATKDTYDALHMQALPPR

SEQ ID NO: 8164 - protein, 489 aa, Artificial Sequence
  source: /note="Description of Artificial Sequence: Synthetic Chimeric Antigen Receptor"
MALPVTALLLPLALLLHAARPDIQMTQSPSSLSASVGDRVTITCQASQDISNYLNWYQQKPGKAPKLLIYDASNLETGVPSRFSGSGSGTDFTFTISSLQPEDIATYYCQQYDNLPLTFGGGTKLEIKRGGGGSGGGGSGGGGSEVQLVESGGGLVKPGGSLRLSCAASGFTFSDYYMGWVRQAPGKGLKWLSYISDRAHTIYDTDSVKGRFTISRDDAKSSLYLRMNNLRVEDTAVYYCARAVGAGEGFDYWGQGTLVTVSSAAATTTPAPRPPTPAPTIASQPLSLRPEACRPAAGGAVHTRGLDFACDIYIWAPLAGTCGVLLLSLVITLYCKRGRKKLLYIFKQPFMRPVQTTQEEDGCSCRFPEEEEGGCELRVKFSRSADAPAYQQGQNQLYNELNLGRREEYDVLDKRRGRDPEMGGKPRRKNPQEGLYNELQKDKMAEAYSEIGMKGERRRGKGHDGLYQGLSTATKDTYDALHMQALPPR

SEQ ID NO: 8165 - protein, 494 aa, Artificial Sequence
  source: /note="Description of Artificial Sequence: Synthetic Chimeric Antigen Receptor"
MALPVTALLLPLALLLHAARPQSALTQPPSASGTPGQRVTISCSGSSSNIGSNYVYWYQQLPGTAPKLLIYRNNQRPSGVPDRFSGSKSGTSASLAISGLRSEDEADYYCAAWDDSLSGYVFGTGTKVTVLGGGGGSGGGGSGGGGSQMQLVQSGAEVKKPGASVKVSCKASGYTFSRYYIHWVRQAPGQGLEWMGLINPGGGSTNYAQKFQGRVTMTRDTSTNTVYLELSSLRSDDTAVYYCARDYGTIDARRFDFWGQGTLVTVSSAAATTTPAPRPPTPAPTIASQPLSLRPEACRPAAGGAVHTRGLDFACDIYIWAPLAGTCGVLLLSLVITLYCKRGRKKLLYIFKQPFMRPVQTTQEEDGCSCRFPEEEEGGCELRVKFSRSADAPAYQQGQNQLYNELNLGRREEYDVLDKRRGRDPEMGGKPRRKNPQEGLYNELQKDKMAEAYSEIGMKGERRRGKGHDGLYQGLSTATKDTYDALHMQALPPR

SEQ ID NO: 8166 - protein, 495 aa, Artificial Sequence
  source: /note="Description of Artificial Sequence: Synthetic Chimeric Antigen Receptor"
MALPVTALLLPLALLLHAARPQSALTQPALTQPASVSGSPGQSITISCTGTSSDFGDYDYVSWYQQHPGKAPKLMIYDVSDRPSGVSNRFSGSKSGNTASLTISGLQAEDEADYFCSSFTTSSTLVFGGGTKLTVLGGGGGSGGGGSGGGGSQVQLVQSGAEVKEPGASVKVSCKASGYTFRNSGITWVRQAPGQGLEWMGWINPNSGGAMYVDNFQGRATMTRDTSINTAYMELRSLSSDDTAVYYCARGMADLIDVFDIWGQGTLVTVSSTTTPAPRPPTPAPTIASQPLSLRPEACRPAAGGAVHTRGLDFACDIYIWAPLAGTCGVLLLSLVITLYCKRGRKKLLYIFKQPFMRPVQTTQEEDGCSCRFPEEEEGGCELRVKFSRSADAPAYQQGQNQLYNELNLGRREEYDVLDKRRGRDPEMGGKPRRKNPQEGLYNELQKDKMAEAYSEIGMKGERRRGKGHDGLYQGLSTATKDTYDALHMQALPPR

SEQ ID NO: 8167 - protein, 485 aa, Artificial Sequence
  source: /note="Description of Artificial Sequence: Synthetic Chimeric Antigen Receptor"
MALPVTALLLPLALLLHAARPDIQMTQSPSSVSASVGDRVTITCRASQGISTLLAWYQQKPGKAPKLLISSASSLQSGVPARFSGSGSGTDFTLTISSLQPEDFATYYCQQSYRAPTFGQGTKVEIKRGGGGSGGGGSGGGGSQVTLKESGPTLLKPTQTLTLTCTFSGFSLSTRGVGVGWIRQPPGQALEWLTLIYWDDDKRYSPSLKSRLTITKDTSKNQVVLTMTNMESVDTATYYCAQQTMTGAFDIWGQGTTVTVSSTTTPAPRPPTPAPTIASQPLSLRPEACRPAAGGAVHTRGLDFACDIYIWAPLAGTCGVLLLSLVITLYCKRGRKKLLYIFKQPFMRPVQTTQEEDGCSCRFPEEEEGGCELRVKFSRSADAPAYQQGQNQLYNELNLGRREEYDVLDKRRGRDPEMGGKPRRKNPQEGLYNELQKDKMAEAYSEIGMKGERRRGKGHDGLYQGLSTATKDTYDALHMQALPPR

SEQ ID NO: 8168 - protein, 488 aa, Artificial Sequence
  source: /note="Description of Artificial Sequence: Synthetic Chimeric Antigen Receptor"
MALPVTALLLPLALLLHAARPETTLTQSPAFMSATPGDKVNISCKASQDIDDDLNWYQQKPGEAPILIIQEATTLVPGIPPRFSGSGFGTDFTLTINSMQSEDVAYYFCLQHDNFPPTFGQGTKVEIKRGGGGSGGGGSGGGGSQVQLQESGPGLVKSSETLSLTCTVSGGSMNNYYWSWIRQPAGKGLEWMGRIYSSGSTNYNPALKSRVTMSVDTSKNQFSLNLSSVTAADTAIYYCARASWSGTYWALFDYWGQGTLVTVSSTTTPAPRPPTPAPTIASQPLSLRPEACRPAAGGAVHTRGLDFACDIYIWAPLAGTCGVLLLSLVITLYCKRGRKKLLYIFKQPFMRPVQTTQEEDGCSCRFPEEEEGGCELRVKFSRSADAPAYQQGQNQLYNELNLGRREEYDVLDKRRGRDPEMGGKPRRKNPQEGLYNELQKDKMAEAYSEIGMKGERRRGKGHDGLYQGLSTATKDTYDALHMQALPPR

SEQ ID NO: 8169 - protein, 490 aa, Artificial Sequence
  source: /note="Description of Artificial Sequence: Synthetic Chimeric Antigen Receptor"
MALPVTALLLPLALLLHAARPQSALTQPASVSGSPGQSITISCTGTSSDVGGYNYVSWYQQHPGKAPKLMIYDVSKRPSGVSNRFSGSKSGNTASLTISGLQAEDEADYYCSSYTGRSTVFGGGTKLTVLGGGGGSGGGGSGGGGSEVQLVQSGGDLVQPGGSLRLSCAASGFTFSSYSMNWVRQAPGKGLEWVSSISSSSSYIYYADSVKGRFTISRDNAKNSLYLQMNSLRAEDTAVYYCARGLGGWTHDAFDIWGQGTTVTVSSTTTPAPRPPTPAPTIASQPLSLRPEACRPAAGGAVHTRGLDFACDIYIWAPLAGTCGVLLLSLVITLYCKRGRKKLLYIFKQPFMRPVQTTQEEDGCSCRFPEEEEGGCELRVKFSRSADAPAYQQGQNQLYNELNLGRREEYDVLDKRRGRDPEMGGKPRRKNPQEGLYNELQKDKMAEAYSEIGMKGERRRGKGHDGLYQGLSTATKDTYDALHMQALPPR

SEQ ID NO: 8170 - protein, 491 aa, Artificial Sequence
  source: /note="Description of Artificial Sequence: Synthetic Chimeric Antigen Receptor"
MALPVTALLLPLALLLHAARPQSVLTQPPSASGTPGQRVTISCSGSSSNIGSNTVNWYQQLPGTAPKLLIYSNNQRPSGVPDRFSGSKSGTSASLAIRGLQSDDEAEYYCAAWDDSLKSFVFGKGTKVTVLGGGGGSGGGGSGGGGSQVQLVQSGAEVKKPGASVKVSCKASGYTFSRYYIHWVRQAPGQGLEWMGLINPGGGSTNYAQKFQGRVTMTRDTSTNTVYLELSSLRSDDTAVYYCARDYGTIDARRFDFWGQGTLVTVSSTTTPAPRPPTPAPTIASQPLSLRPEACRPAAGGAVHTRGLDFACDIYIWAPLAGTCGVLLLSLVITLYCKRGRKKLLYIFKQPFMRPVQTTQEEDGCSCRFPEEEEGGCELRVKFSRSADAPAYQQGQNQLYNELNLGRREEYDVLDKRRGRDPEMGGKPRRKNPQEGLYNELQKDKMAEAYSEIGMKGERRRGKGHDGLYQGLSTATKDTYDALHMQALPPR

SEQ ID NO: 8171 - protein, 483 aa, Artificial Sequence
  source: /note="Description of Artificial Sequence: Synthetic Chimeric Antigen Receptor"
MALPVTALLLPLALLLHAARPEIVLTQSPGTLSLSPGERATLSCRASQSVSSSYLAWYQQKPGQAPRLLIYGASSRATGIPDRFSGSGSGTDFTLTISRLEPEDFAVYYCQQYGSSFGPGTKVDIKRGGGGSGGGGSGGGGSQVQLVQSGTEVKKPGSSVKVSCQASGGSLSSHGVSWLRQAPGQGLEWVGRIIPMFGVTDYAQKFQDRVTITADKSTSTVYMELISLGSDDTAVYFCARESRGATFEYWGQGTLVTVSSTTTPAPRPPTPAPTIASQPLSLRPEACRPAAGGAVHTRGLDFACDIYIWAPLAGTCGVLLLSLVITLYCKRGRKKLLYIFKQPFMRPVQTTQEEDGCSCRFPEEEEGGCELRVKFSRSADAPAYQQGQNQLYNELNLGRREEYDVLDKRRGRDPEMGGKPRRKNPQEGLYNELQKDKMAEAYSEIGMKGERRRGKGHDGLYQGLSTATKDTYDALHMQALPPR

SEQ ID NO: 8172 - protein, 491 aa, Artificial Sequence
  source: /note="Description of Artificial Sequence: Synthetic Chimeric Antigen Receptor"
MALPVTALLLPLALLLHAARPQSALTQPPSASGTPGQRVTISCPGSSSNIGSNYVYWYQQLPGTAPKLLIYRNNQRPSGVPDRFSGSKSGTSATLGITGLQTGDEADYYCGTWDSSLSAYVFGTGTKVTVLGGGGGSGGGGSGGGGSQVQLQQSGAEVKKPGASVKVSCKASGYTFSRYYIHWVRRAPGQGLEWMGLINPGGGSTNYAQKFQGRVTMTRDTSTNTVYLELSSLRSDDTAVYYCARDYGTIDARRFDFWGQGTLVTVSSTTTPAPRPPTPAPTIASQPLSLRPEACRPAAGGAVHTRGLDFACDIYIWAPLAGTCGVLLLSLVITLYCKRGRKKLLYIFKQPFMRPVQTTQEEDGCSCRFPEEEEGGCELRVKFSRSADAPAYQQGQNQLYNELNLGRREEYDVLDKRRGRDPEMGGKPRRKNPQEGLYNELQKDKMAEAYSEIGMKGERRRGKGHDGLYQGLSTATKDTYDALHMQALPPR

SEQ ID NO: 8173 - protein, 492 aa, Artificial Sequence
  source: /note="Description of Artificial Sequence: Synthetic Chimeric Antigen Receptor"
MALPVTALLLPLALLLHAARPQSALTQPASVSGSPGQSITISCTGTSSDFGDYDYVSWYQQHPGKAPKLMIYDVSDRPSGVSNRFSGSKSGNTASLTISGLQAEDEADYFCSSFTTSSTLVFGGGTKLTVLGGGGGSGGGGSGGGGSQVQLVQSGAEVKKPGASVKVSCKASGYTFTGYYMHWVRQAPGQGLEWMGWINPNSGGTNYAQKFQGRVTMTRDTSISTAYMELSRLRSDDTAVYYCARDGDMVYDSSGPDYWGQGTLVTVSSTTTPAPRPPTPAPTIASQPLSLRPEACRPAAGGAVHTRGLDFACDIYIWAPLAGTCGVLLLSLVITLYCKRGRKKLLYIFKQPFMRPVQTTQEEDGCSCRFPEEEEGGCELRVKFSRSADAPAYQQGQNQLYNELNLGRREEYDVLDKRRGRDPEMGGKPRRKNPQEGLYNELQKDKMAEAYSEIGMKGERRRGKGHDGLYQGLSTATKDTYDALHMQALPPR

SEQ ID NO: 8174 - protein, 689 aa, Artificial Sequence
  source: /note="Description of Artificial Sequence: Synthetic Chimeric Antigen Receptor"
TAMDFQVQIFSFLLISASVIMSREVQLVETGGGLVQPGKSLELTCATSGFTFNTAWMHWVRQSPDKRLEWIARIKDTSNNYATDYVESMKGRFTISRDDSKGSVNLQMNSLKEEDTATYYCTTDFYDGTYYWNYWGQGVMVTVSSGGGGSGGGGSGGGGSSYELIQPPSAAVTLGNTVSLTCVGDELPKRYAYWYQQKPDQSIVRVIYEDSVRPPGISDRFSGSSSGTTATLTIRDAQNEDEADYYCQSTYGDDKLYIFGGGTKLTVLGDPAEPKSPDKTHTCPPCPAPELLGGPSVFLFPPKPKDTLMISRTPEVTCVVVDVSHEDPEVKFNWYVDGVEVHNAKTKPREEQYNSTYRVVSVLTVLHQDWLNGKEYKCKVSNKALPAPIEKTISKAKGQPREPQVYTLPPSRDELTKNQVSLTCLVKGFYPSDIAVEWESNGQPENNYKTTPPVLDSDGSFFLYSKLTVDKSRWQQGNVFSCSVMHEALHNHYTQKSLSLSPGKKDPKFWVLVVVGGVLACYSLLVTVAFIIFWVRSKRSRLLHSDYMNMTPRRPGPTRKHYQPYAPPRDFAAYRSLRVKFSRSADAPAYQQGQNQLYNELNLGRREEYDVLDKRRGRDPEMGGKPRRKNPQEGLYNELQKDKMAEAYSEIGMKGERRRGKGHDGLYQGLSTATKDTYDALHMQALPPR

SEQ ID NO: 8175 - protein, 679 aa, Artificial Sequence
  source: /note="Description of Artificial Sequence: Synthetic Chimeric Antigen Receptor"
MDFQVQIFSFLLISASVIMSRQVQLKESGPGLVAPSQSLSITCTVSGFSLSSQGVYWVRQPPGKGLEWLGAIWAGGSTNYNSALMSRLSISKDNSKSQVFLKMNSLQTDDTAMYYCARVDGYRGYNMDYWGQGTSVTVSSGGGGSGGGGSGGGGSENVLTQSPAIMSASPGEKVTMTCSASSSVSYMHWYQQKSSTSPKLWIYDTSKLASGVPGRFSGSGSGNSYSLTISSMEAEDVATYYCFQGSGYPLTFGAGTKLELKAAALPAEPKSPDKTHTCPPCPAPPVAGPSVFLFPPKPKDTLMIARTPEVTCVVVDVSHEDPEVKFNWYVDGVEVHNAKTKPREEQYNSTYRVVSVLTVLHQDWLNGKEYKCKVSNKALPAPIEKTISKAKGQPREPQVYTLPPSRDELTKNQVSLTCLVKGFYPSDIAVEWESNGQPENNYKTTPPVLDSDGSFFLYSKLTVDKSRWQQGNVFSCSVMHEALHNHYTQKSLSSLSPGKKIYIWAPLAGTCGVLLLSLVITLYCKRGRKKLLYIFKQPFMRPVQTTQEEDGCSCRFPEEEEGGCELLRVKFSRSADAPAYQQGQNQLYNELNLGRREEYDVLDKRRGRDPEMGGKPRRKNPQEGLYNELQKDKMAEAYSEIGMKGERRRGKGHDGLYQGLSTATKDTYDALHMQALPPR

SEQ ID NO: 8176 - protein, 679 aa, Artificial Sequence
  source: /note="Description of Artificial Sequence: Synthetic Chimeric Antigen Receptor"
MDFQVQIFSFLLISASVIMSRENVLTQSPAIMSASPGEKVTMTCSASSSVSYMHWYQQKSSTSPKLWIYDTSKLASGVPGRFSGSGSGNSYSLTISSMEAEDVATYYCFQGSGYPLTFGAGTKLELKGGGGSGGGGSGGGGSQVQLKESGPGLVAPSQSLSITCTVSGFSLSSQGVYWVRQPPGKGLEWLGAIWAGGSTNYNSALMSRLSISKDNSKSQVFLKMNSLQTDDTAMYYCARVDGYRGYNMDYWGQGTSVTVSSAAALPAEPKSPDKTHTCPPCPAPPVAGPSVFLFPPKPKDTLMIARTPEVTCVVVDVSHEDPEVKFNWYVDGVEVHNAKTKPREEQYNSTYRVVSVLTVLHQDWLNGKEYKCKVSNKALPAPIEKTISKAKGQPREPQVYTLPPSRDELTKNQVSLTCLVKGFYPSDIAVEWESNGQPENNYKTTPPVLDSDGSFFLYSKLTVDKSRWQQGNVFSCSVMHEALHNHYTQKSLSSLSPGKKIYIWAPLAGTCGVLLLSLVITLYCKRGRKKLLYIFKQPFMRPVQTTQEEDGCSCRFPEEEEGGCELLRVKFSRSADAPAYQQGQNQLYNELNLGRREEYDVLDKRRGRDPEMGGKPRRKNPQEGLYNELQKDKMAEAYSEIGMKGERRRGKGHDGLYQGLSTATKDTYDALHMQALPPR

SEQ ID NO: 8177 - protein, 458 aa, Artificial Sequence
  source: /note="Description of Artificial Sequence: Synthetic Chimeric Antigen Receptor"
MALPVTALLLPLALLLHAARPEVQLQQSGPDLVKPGASVKISCKASGYSFTGYYMHWVKQSHGKSLEWIGRINPNNGVTLYNQKFKDKAILTVDKSSTTAYMELRSLTSEDSAVYYCARSTMITNYVMDYWGQVTSVTVSSGGGGSGGGGSGGGGSSIVMTQTPTFLLVSAGDRVTITCKASQSVSNDVAWYQQKPGQSPTLLISYTSSRYAGVPDRFIGSGYGTDFTFTISTLQAEDLAVYFCQQDYNSPPTFGGGTKLEIKRGLAVSTISSFFPPGYQIYIWAPLAGTCGVLLLSLVITLYCKRGRKKLLYIFKQPFMRPVQTTQEEDGCSCRFPEEEEGGCELRVKFSRSADAPAYQQGQNQLYNELNLGRREEYDVLDKRRGRDPEMGGKPRRKNPQEGLYNELQKDKMAEAYSEIGMKGERRRGKGHDGLYQGLSTATKDTYDALHMQALPPR

SEQ ID NO: 8178 - protein, 1717 aa, Artificial Sequence [sequence omitted]

SEQ ID NO: 8179 - protein, 912 aa, Artificial Sequence
  source: /note="Description of Artificial Sequence: Synthetic Chimeric Antigen Receptor"
SLPVTALLLPLALLLHAARPDIQMTQTTSSLSASLGDRVTISCRASQDISKYLNWYQQKPDGTVKLLIYHTSRLHSGVPSRFSGSGSGTDYSLTISNLEQEDIATYFCQQGNTLPYTFGGGTKLEITKAGGGGSGGGGSGGGGSGGGGSEVKLQESGPGLVAPSQSLSVTCTVSGVSLPDYGVSWIRQPPRKGLEWLGVIWGSETTYYNSALKSRLTIIKDNSKSQVFLKMNSLQTDDTAIYYCAKHYYYGGSYAMDYWGQGTSVTVSSDPTTTPAPRPPTPAPTIASQPLSLRPEACRPAAGGAVHTRGLDFACDIFVWLVWGGVLACYSLLVTVAFIIFWVRRVKFSRSADAPAYQQGQNQLYNELNLGRREEYDVLDKRRGRDPEMGGKPRRKNPQEGLYNELQKDKMAEAYSEIGMKGERRRGKGHDGLYQGLSTATKDTYDALHMQALPPRRAEGRGSLLTCGDVEENPGPMAVPTQVLGLLLLWLTDARCDIQMTQSPSSLSASVGDRVTITCRASEDIYFNLVWYQQKPGKAPKLLIYDTNRLADGVPSRFSGSGSGTQYTLTISSLQPEDFATYYCQHYKNYPLTFGQGTKLEIKRSGGGGSGGGGSGGGGSGGGGSRSEVQLVESGGGLVQPGGSLRLSCAASGFTLSNYGMHWIRQAPGKGLEWVSSISLNGGSTYYRDSVKGRFTISRDNAKSTLYLQNSLRAEDTAVYYCAAQDAYTGGYFDYWGQGTLVTVSSMDPATTTKPVLRTPSPVHPTGTSQPQRPEDCRPRGSVKGTGLDFACDILIGVSWFLFCLLLLVLFCLHRQNQIKQGPPRSKDEEQKPQQRPDLAVDVLERTADKANGLPEKDRETDTSALAAGSSQEVTYAQLDHWALTQRTARAVSPQSTKPMAESITYAAVARH

SEQ ID NO: 8180 - protein, 1112 aa, Artificial Sequence
  source: /note="Description of Artificial Sequence: Synthetic Chimeric Antigen Receptor"
MSLPVTALLLPLALLLHAARPDIQMTQTTSSLSASLGDRVTISCRASQDISKYLNWYQQKPDGTVKLLIYHTSRLHSGVPSRFSGSGSGTDYSLTISNLEQEDIATYFCQQGNTLPYTFGGGTKLEITKAGGGGSGGGGSGGGGSGGGGSEVKLQESGPGLVAPSQSLSVTCTVSGVSLPDYGVSWIRQPPRKGLEWLGVIWGSETTYYNSALKSRLTIIKDNSKSQVFLKMNSLQTDDTAIYYCAKHYYYGGSYAMDYWGQGTSVTVSSDPTTTPAPRPPTPAPTIASQPLSLRPEACRPAAGGAVHTRGLDFACDIFVWLWVGGVLACYSLLVTVAFIIFVWRRVKFSRSADAPAYQQGQNQLYNELNLGRREEYDVLDKRRGRDPEGGKPRRKNPQEGLYNELQKDKMAEAYSEIGKGERRRGKGHDGLYQGLSTATKDTYDALHMQALPPRRAEGRGSLLTCGDVEENPGPMAVPTQVLGLLLLWLTDARCDIQMTQSPSSLSASVGDRVTITCRASEDIYFNLNAAYQQKPGKAPKLLIYDTNRLADGVPSRFSGSGSGTQYTLTISSLQPEDFATYYCQHYKNYPLTFGQGTKLEIKRSGGGGSGGGGSGGGGSGGGGSRSEVQLVESGGGLVQPGGSLRLSCAASGFTLSNYGMHWIRQAPGKGLEWVSSISLNGGSTYYRDSVKGRFTISRDNAKSTLYLQMNSLRAEDTAVYYCAAQDAYTGGYFDYWGQGTLVTVSSMDPATTTKPVLRTPSPVHPTGTSQPQRPEDCRPRGSVKGTGLDFACDIYWAPLAGICVALLLSLIITLICYHRSRKRVCKSGGGSFWEEFESLQKQEVKNLHQRLEGQRPENKGKNRYKNILPFDHSRVILQGRDSNIPGSDYINANYIKNQLLGPDENAKTYIASQGCLEATVNDFWQMAWQENSRVIVMTTREVEKGRNKCVPYWPEVGMQRAYGPYSVTNCGEHDTTEYKLRTLQVSPLDNGDLIREIWHYQYLSWPDHGVPSEPGGVLSFLDQINQRQESLPHAGPIIVHCSAGIGRTGTIIVIDMLMENISTKGLDCDIDIQKTIQMVRAQRSGMVQTEAQYKFIYVAIAQFIETTKKKL

SEQ ID NO: 8181 - protein, 1114 aa, Artificial Sequence; identical to SEQ ID NO: 7085
  source: /note="Description of Artificial Sequence: Synthetic Chimeric Antigen Receptor"

SEQ ID NO: 8182 - protein, 1363 aa, Artificial Sequence
  source: /note="Description of Artificial Sequence: Synthetic Chimeric Antigen Receptor"
MSLPVTALLLPLALLLHAARPDIQMTQTTSSLSASLGDRVTISCRASQDISKYLNWYQQKPDGTVKLLIYHTSRLHSGVPSRFSGSGSGTDYSLTISNLEQEDIATYFCQQGNTLPYTFGGGTKLEITKAGGGGSGGGGSGGGGSGGGGSEVKLQESGPGLVAPSQSLSVTCTVSGVSLPDYGVSWIRQPPRKGLEWLGVIWGSETTYYNSALKSRLTIIKDNSKSQVFLKMNSLQTDDTAIYYCAKHYYYGGSYAMDYWGQGTSVTVSSDPTTTPAPRPPTPAPTIASQPLSLRPEACRPAAGGAVHTRGLDFACDIFWVLVVVGGVLACYSLLVTVAFIIFWVRRVKFSRSADAPAYQQGQNQLYNELNLGRREEYDVLDKRRGRDPEMGGKPRRKNPQEGLYNELQKDKMAEAYSEIGMKGERRRGKGHDGLYQGLSTATKDTYDALHMQALPPRRAEGRGSLLTCGDVEENPGPMAVPTQVLGLLLLWLTDARCDIQMTQSPSSLSASVGDRVTITCRASEDIYFNLVWYQQKPGKAPKLLIYDTNRLADGVPSRFSGSGSGTQYTLTISSLQPEDFATYYCQHYKNYPLTFGQGTKLEIKRSGGGGSGGGGSGGGGSGGGGSRSEVQLVESGGGLVQPGGSLRLSCAASGFTLSNYGMHWIRQAPGKGLEWVSSISLNGGSTYYRDSVKGRFTISRDNAKSTLYLQMNSLRAEDTAVYYCAAQDAYTGGYFDYWGQGTLVTVSSMDPATTTKPVLRTPSPVHPTGTSQPQRPEDCRPRGSVKGTGLDFACDILIGVSVVFLFCLLLLVLFCLHRQNQIKQGPPRSKDEEQKPQQRPDLAVDVLERTADKATVNGLPEKDRETDTSALAAGSSQEVTYAQLDHWALTQRTARAVSPQSTKPMAESITYAAVARHRAEGRGSLLTCGDVEENPGPWYHGHMSGGQAETLLQAKGEPWTFLVRESLSQPGDFVLSVLSDQPKAGPGSPLRVTHIKVMCEGGRYTVGGLETFDSLTDLVEHFKKTGIEEASGAFVYLRQPYSGGGGSFEAYFKKQQADSNCGFAEEYEDLKLVGISQPKYAAELAENRGKNRYNNVLPYDISRVKLSVQTHSTDDYINANYMPGYHSKKDFIATQGPLPNTLKDFWRMVWEKNVYAIIMLTKCVEQGRTKCEEYWPSKQAQDYGDITVAMTSEIVLPEWTIRDFTVKNIQTSESHPLRQFHFTSWPDHGVPDTTDLLINFRYLVRDYMKQSPPESPILVHCSAGVGRTGTFIAIDRLIYQIENENTVDVYGIVYDLRMHRPLMVQTEDQYVFLNQCVLDIVRSQKDSKVDLIYQNTTAMTIYENLAPVTTFGKTNGYIASGS

SEQ ID NO: 8183 - protein, 689 aa, Artificial Sequence; identical to SEQ ID NO: 8174
  source: /note="Description of Artificial Sequence: Synthetic Chimeric Antigen Receptor"

SEQ ID NO: 8184 - protein, 489 aa, Artificial Sequence
  source: /note="Description of Artificial Sequence: Synthetic Chimeric Antigen Receptor"
MALPVTALLLPLALLLHAARPQVTLKESGPGILKPSQTLSLTCSFSGFSLSTSGMGVGWIRQPSGKGLEWLAHIWWDDDKYYNPSLKSQLTISKDTSRNQVFLKITSVDTADTATYYCSRRPRGTMDAMDYWGQGTSVTVSSGGGGSGGGGSGGGGSDIVMTQAASSLSASLGDRVTISCRASQDISKYLNWYQQKPDGTVKLLIYYTSRLHSGVPSRFSGSGSGTDYSLTIRNLEQEDIATYFCQQVYTLPWTFGGGTKLEIKSGTTTPAPRPPTPAPTIASQPLSLRPEACRPAAGGAVHTRGLDFACDIYIWAPLAGTCGVLLLSLVITLYCKRGRKKLLYIFKQPFMRPVQTTQEEDGCSCRFPEEEEGGCELRVKFSRSADAPAYKQGQNQLYNELNLGRREEYDVLDKRRGRDPEMGGKPRRKNPQEGLYNELQKDKMAEAYSEIGMKGERRRGKGHDGLYQGLSTATKDTYDALHMQALPPR

SEQ ID NO: 8185 - protein, 461 aa, Artificial Sequence
  source: /note="Description of Artificial Sequence: Synthetic Chimeric Antigen Receptor"
MALPVTALLLPLALLLHAARPEVQLQQSGPDLVKPGASVKISCKASGYSFTGYYMHWVKQSHGKSLEWIGRINPNNGVTLYNQKFKDKAILTVDKSSTTAYMELRSLTSEDSAVYYCARSTMITNYVMDYWGQVTSVTVSSGGGGSGGGGSGGGGSSIVMTQTPTFLLVSAGDRVTITCKASQSVSNDVAWYQQKPGQSPTLLISYTSSRYAGVPDRFIGSGYGTDFTFTISTLQAEDLAVYFCQQDYNSPPTFGGGTKLEIKRGLAVSTISSFFPPGYQIISFFLALTSTALLFLLFFLTLRFSVVKRGRKKLLYIFKQPFMRPVQTTQEEDGCSCRFPEEEEGGCELRVKFSRSADAPAYQQGQNQLYNELNLGRREEYDVLDKRRGRDPEMGGKPRRKNPQEGLYNELQKDKMAEAYSEIGMKGERRRGKGHDGLYQGLSTATKDTYDALHMQALPPR

SEQ ID NO: 8186 - protein, 487 aa, Artificial Sequence
  source: /note="Description of Artificial Sequence: Synthetic Chimeric Antigen Receptor"
MALPVTALLLPLALLLHAARPEVQLQQSGPDLVKPGASVKISCKASGYSFTGYYMHWVKQSHGKSLEWIGRINPNNGVTLYNQKFKDKAILTVDKSSTTAYMELRSLTSEDSAVYYCARSTMITNYVMDYWGQVTSVTVSSGGGGSGGGGSGGGGSSIVMTQTPTFLLVSAGDRVTITCKASQSVSNDVAWYQQKPGQSPTLLISYTSSRYAGVPDRFIGSGYGTDFTFTISTLQAEDLAVYFCQQDYNSPPTFGGGTKLEIKRTTTPAPRPPTPAPTIASQPLSLRPEACRPAAGGAVHTRGLDFACDIYIWAPLAGTCGVLLLSLVITLYCKRGRKKLLYIFKQPFMRPVQTTQEEDGCSCRFPEEEEGGCELRVKFSRSADAPAYQQGQNQLYNELNLGRREEYDVLDKRRGRDPEMGGKPRRKNPQEGLYNELQKDKMAEAYSEIGMKGERRRGKGHDGLYQGLSTATKDTYDALHMQALPPR

SEQ ID NO: 8187 - protein, 490 aa, Artificial Sequence
  source: /note="Description of Artificial Sequence: Synthetic Chimeric Antigen Receptor"
MALPVTALLLPLALLLHAARPEVQLQQSGPDLVKPGASVKISCKASGYSFTGYYMHWVKQSHGKSLEWIGRINPNNGVTLYNQKFKDKAILTVDKSSTTAYMELRSLTSEDSAVYYCARSTMITNYVMDYWGQVTSVTVSSGGGGSGGGGSGGGGSSIVMTQTPTFLLVSAGDRVTITCKASQSVSNDVAWYQQKPGQSPTLLISYTSSRYAGVPDRFIGSGYGTDFTFTISTLQAEDLAVYFCQQDYNSPPTFGGGTKLEIKRTTTPAPRPPTPAPTIASQPLSLRPEACRPAAGGAVHTRGLDFACDIISFFLALTSTALLFLLFFLTLRFSVVKRGRKKLLYIFKQPFMRPVQTTQEEDGCSCRFPEEEEGGCELRVKFSRSADAPAYQQGQNQLYNELNLGRREEYDVLDKRRGRDPEMGGKPRRKNPQEGLYNELQKDKMAEAYSEIGMKGERRRGKGHDGLYQGLSTATKDTYDALHMQALPPR

SEQ ID NO: 8188 - protein, 490 aa, Artificial Sequence; identical to SEQ ID NO: 8187
  source: /note="Description of Artificial Sequence: Synthetic Chimeric Antigen Receptor"

SEQ ID NO: 8189 - protein, 676 aa, Artificial Sequence
  source: /note="Description of Artificial Sequence: Synthetic Chimeric Antigen Receptor"
MALPVTALLLPLALLLHAARPEVQLQQSGPDLVKPGASVKISCKASGYSFTGYYMHWVKQSHGKSLEWIGRINPNNGVTLYNQKFKDKAILTVDKSSTTAYMELRSLTSEDSAVYYCARSTMITNYVMDYWGQVTSVTVSSGGGGSGGGGSGGGGSSIVMTQTPTFLLVSAGDRVTITCKASQSVSNDVAWYQQKPGQSPTLLISYTSSRYAGVPDRFIGSGYGTDFTFTISTLQAEDLAVYFCQQDYNSPPTFGGGTKLEIKREPKSPDKTHTCPPCPAPPVAGPSVFLFPPKPKDTLMIARTPEVTCVVVDVSHEDPEVKFNWYVDGVEVHNAKTKPREEQYNSTYRVVSVLTVLHQDWLNGKEYKCKVSNKALPAPIEKTISKAKGQPREPQVYTLPPSRDELTKNQVSLTCLVKGFYPSDIAVEWESNGQPENNYKTTPPVLDSDGSFFLYSKLTVDKSRWQQGNVFSCSVMHEALHNHYTQKSLSLSPGKIISFFLALTSTALLFLLFFLTLRFSVVKRGRKKLLYIFKQPFMRPVQTTQEEDGCSCRFPEEEEGGCELRVKFSRSADAPAYQQGQNQLYNELNLGRREEYDVLDKRRGRDPEMGGKPRRKNPQEGLYNELQKDKMAEAYSEIGMKGERRRGKGHDGLYQGLSTATKDTYDALHMQALPPR

SEQ ID NO: 8190 - protein, 455 aa, Artificial Sequence
  source: /note="Description of Artificial Sequence: Synthetic Chimeric Antigen Receptor"
MALPVTALLLPLALLLHAARPQIQLVQSGPELKKPGETVKISCKASGYTFTNFGMNWVKQGPGEGLKWMGWINTNTGEPRYAEEFKGRFAFSLETTASTAYLQINNLKNEDTATYFCARDWDGAYFFDYWGQGTTLTVSSGGGSGGGGSGGGGSSIVMTQTPKFLLVSAGDRVTITCKASQSVSNDVAWYQQKPGQSPKLLINFATNRYTGVPNRFTGSGYGTDFTFTISTVQAEDLALYFCQQDYSSPWTFGGGTKLEIKGLAVSTISSFFPPGYQIYIWAPLAGTCGVLLLSLVITLYCKRGRKKLLYIFKQPFMRPVQTTQEEDGCSCRFPEEEEGGCELRVKFSRSADAPAYQQGQNQLYNELNLGRREEYDVLDKRRGRDPEMGGKPRRKNPQEGLYNELQKDKMAEAYSEIGMKGERRRGKGHDGLYQGLSTATKDTYDALHMQALPPR

SEQ ID NO: 8191 - protein, 458 aa, Artificial Sequence
  source: /note="Description of Artificial Sequence: Synthetic Chimeric Antigen Receptor"
MALPVTALLLPLALLLHAARPQIQLVQSGPELKKPGETVKISCKASGYTFTNFGMNWVKQGPGEGLKWMGWINTNTGEPRYAEEFKGRFAFSLETTASTAYLQINNLKNEDTATYFCARDWDGAYFFDYWGQGTTLTVSSGGGSGGGGSGGGGSSIVMTQTPKFLLVSAGDRVTITCKASQSVSNDVAWYQQKPGQSPKLLINFATNRYTGVPNRFTGSGYGTDFTFTISTVQAEDLALYFCQQDYSSPWTFGGGTKLEIKGLAVSTISSFFPPGYQIISFFLALTSTALLFLLFFLTLRFSVVKRGRKKLLYIFKQPFMRPVQTTQEEDGCSCRFPEEEEGGCELRVKFSRSADAPAYQQGQNQLYNELNLGRREEYDVLDKRRGRDPEMGGKPRRKNPQEGLYNELQKDKMAEAYSEIGMKGERRRGKGHDGLYQGLSTATKDTYDALHMQALPPR

SEQ ID NO: 8192 - protein, 484 aa, Artificial Sequence
  source: /note="Description of Artificial Sequence: Synthetic Chimeric Antigen Receptor"
MALPVTALLLPLALLLHAARPQIQLVQSGPELKKPGETVKISCKASGYTFTNFGMNWVKQGPGEGLKWMGWINTNTGEPRYAEEFKGRFAFSLETTASTAYLQINNLKNEDTATYFCARDWDGAYFFDYWGQGTTLTVSSGGGSGGGGSGGGGSSIVMTQTPKFLLVSAGDRVTITCKASQSVSNDVAWYQQKPGQSPKLLINFATNRYTGVPNRFTGSGYGTDFTFTISTVQAEDLALYFCQQDYSSPWTFGGGTKLEIKTTTPAPRPPTPAPTIASQPLSLRPEACRPAAGGAVHTRGLDFACDIYIWAPLAGTCGVLLLSLVITLYCKRGRKKLLYIFKQPFMRPVQTTQEEDGCSCRFPEEEEGGCELRVKFSRSADAPAYQQGQNQLYNELNLGRREEYDVLDKRRGRDPEMGGKPRRKNPQEGLYNELQKDKMAEAYSEIGMKGERRRGKGHDGLYQGLSTATKDTYDALHMQALPPR

SEQ ID NO: 8193 - protein, 487 aa, Artificial Sequence
  source: /note="Description of Artificial Sequence: Synthetic Chimeric Antigen Receptor"
MALPVTALLLPLALLLHAARPQIQLVQSGPELKKPGETVKISCKASGYTFTNFGMNWVKQGPGEGLKWMGWINTNTGEPRYAEEFKGRFAFSLETTASTAYLQINNLKNEDTATYFCARDWDGAYFFDYWGQGTTLTVSSGGGSGGGGSGGGGSSIVMTQTPKFLLVSAGDRVTITCKASQSVSNDVAWYQQKPGQSPKLLINFATNRYTGVPNRFTGSGYGTDFTFTISTVQAEDLALYFCQQDYSSPWTFGGGTKLEIKTTTPAPRPPTPAPTIASQPLSLRPEACRPAAGGAVHTRGLDFACDIISFFLALTSTALLFLLFFLTLRFSVVKRGRKKLLYIFKQPFMRPVQTTQEEDGCSCRFPEEEEGGCELRVKFSRSADAPAYQQGQNQLYNELNLGRREEYDVLDKRRGRDPEMGGKPRRKNPQEGLYNELQKDKMAEAYSEIGMKGERRRGKGHDGLYQGLSTATKDTYDALHMQALPPR

SEQ ID NO: 8194 - protein, 670 aa, Artificial Sequence
  source: /note="Description of Artificial Sequence: Synthetic Chimeric Antigen Receptor"
MALPVTALLLPLALLLHAARPQIQLVQSGPELKKPGETVKISCKASGYTFTNFGMNWVKQGPGEGLKWMGWINTNTGEPRYAEEFKGRFAFSLETTASTAYLQINNLKNEDTATYFCARDWDGAYFFDYWGQGTTLTVSSGGGSGGGGSGGGGSSIVMTQTPKFLLVSAGDRVTITCKASQSVSNDVAWYQQKPGQSPKLLINFATNRYTGVPNRFTGSGYGTDFTFTISTVQAEDLALYFCQQDYSSPWTFGGGTKLEIKEPKSPDKTHTCPPCPAPPVAGPSVFLFPPKPKDTLMIARTPEVTCVVVDVSHEDPEVKFNWYVDGVEVHNAKTKPREEQYNSTYRVVSVLTVLHQDWLNGKEYKCKVSNKALPAPIEKTISKAKGQPREPQVYTLPPSRDELTKNQVSLTCLVKGFYPSDIAVEWESNGQPENNYKTTPPVLDSDGSFFLYSKLTVDKSRWQQGNVFSCSVMHEALHNHYTQKSLSLSPGKIYIWAPLAGTCGVLLLSLVITLYCKRGRKKLLYIFKQPFMRPVQTTQEEDGCSCRFPEEEEGGCELRVKFSRSADAPAYQQGQNQLYNELNLGRREEYDVLDKRRGRDPEMGGKPRRKNPQEGLYNELQKDKMAEAYSEIGMKGERRRGKGHDGLYQGLSTATKDTYDALHMQALPPR

SEQ ID NO: 8195 - protein, 673 aa, Artificial Sequence
  source: /note="Description of Artificial Sequence: Synthetic Chimeric Antigen Receptor"
MALPVTALLLPLALLLHAARPQIQLVQSGPELKKPGETVKISCKASGYTFTNFGMNWVKQGPGEGLKWMGWINTNTGEPRYAEEFKGRFAFSLETTASTAYLQINNLKNEDTATYFCARDWDGAYFFDYWGQGTTLTVSSGGGSGGGGSGGGGSSIVMTQTPKFLLVSAGDRVTITCKASQSVSNDVAWYQQKPGQSPKLLINFATNRYTGVPNRFTGSGYGTDFTFTISTVQAEDLALYFCQQDYSSPWTFGGGTKLEIKEPKSPDKTHTCPPCPAPPVAGPSVFLFPPKPKDTLMIARTPEVTCVVVDVSHEDPEVKFNWYVDGVEVHNAKTKPREEQYNSTYRVVSVLTVLHQDWLNGKEYKCKVSNKALPAPIEKTISKAKGQPREPQVYTLPPSRDELTKNQVSLTCLVKGFYPSDIAVEWESNGQPENNYKTTPPVLDSDGSFFLYSKLTVDKSRWQQGNVFSCSVMHEALHNHYTQKSLSLSPGKIISFFLALTSTALLFLLFFLTLRFSVVKRGRKKLLYIFKQPFMRPVQTTQEEDGCSCRFPEEEEGGCELRVKFSRSADAPAYQQGQNQLYNELNLGRREEYDVLDKRRGRDPEMGGKPRRKNPQEGLYNELQKDKMAEAYSEIGMKGERRRGKGHDGLYQGLSTATKDTYDALHMQALPPR

SEQ ID NO: 8196 - protein, 455 aa, Artificial Sequence
  source: /note="Description of Artificial Sequence: Synthetic Chimeric Antigen Receptor"
MALPVTALLLPLALLLHAARPQVQLQQSRPELVKPGASVKMSCKASGYTFTDYVISWVKQRTGQGLEWIGEIYPGSNSIYYNEKFKGRATLTADKSSSTAYMQLSSLTSEDSAVYFCAMGGNYGFDYWGQGTTLTVSSGGGGSGGGGSGGGGSQIVLTQSPAIMSASLGERVTLTCTASSSVNSNYLHWYQQKPGSSPKLWIYSTSNLASGVPARFSGSGSGTSYSLTISSMEAEDAATYYCHQYHRSPLTFGAGTKLELKGLAVSTISSFFPPGYQIYIWAPLAGTCGVLLLSLVITLYCKRGRKKLLYIFKQPFMRPVQTTQEEDGCSCRFPEEEEGGCELRVKFSRSADAPAYQQGQNQLYNELNLGRREEYDVLDKRRGRDPEMGGKPRRKNPQEGLYNELQKDKMAEAYSEIGMKGERRRGKGHDGLYQGLSTATKDTYDALHMQALPPR

SEQ ID NO: 8197 - protein, 458 aa, Artificial Sequence
  source: /note="Description of Artificial Sequence: Synthetic Chimeric Antigen Receptor"
MALPVTALLLPLALLLHAARPQVQLQQSRPELVKPGASVKMSCKASGYTFTDYVISWVKQRTGQGLEWIGEIYPGSNSIYYNEKFKGRATLTADKSSSTAYMQLSSLTSEDSAVYFCAMGGNYGFDYWGQGTTLTVSSGGGGSGGGGSGGGGSQIVLTQSPAIMSASLGERVTLTCTASSSVNSNYLHWYQQKPGSSPKLWIYSTSNLASGVPARFSGSGSGTSYSLTISSMEAEDAATYYCHQYHRSPLTFGAGTKLELKGLAVSTISSFFPPGYQIISFFLALTSTALLFLLFFLTLRFSVVKRGRKKLLYIFKQPFMRPVQTTQEEDGCSCRFPEEEEGGCELRVKFSRSADAPAYQQGQNQLYNELNLGRREEYDVLDKRRGRDPEMGGKPRRKNPQEGLYNELQKDKMAEAYSEIGMKGERRRGKGHDGLYQGLSTATKDTYDALHMQALPPR

SEQ ID NO: 8198 - protein, 484 aa, Artificial Sequence
  source: /note="Description of Artificial Sequence: Synthetic Chimeric Antigen Receptor"
MALPVTALLLPLALLLHAARPQVQLQQSRPELVKPGASVKMSCKASGYTFTDYVISWVKQRTGQGLEWIGEIYPGSNSIYYNEKFKGRATLTADKSSSTAYMQLSSLTSEDSAVYFCAMGGNYGFDYWGQGTTLTVSSGGGGSGGGGSGGGGSQIVLTQSPAIMSASLGERVTLTCTASSSVNSNYLHWYQQKPGSSPKLWIYSTSNLASGVPARFSGSGSGTSYSLTISSMEAEDAATYYCHQYHRSPLTFGAGTKLELKTTTPAPRPPTPAPTIASQPLSLRPEACRPAAGGAVHTRGLDFACDIYIWAPLAGTCGVLLLSLVITLYCKRGRKKLLYIFKQPFMRPVQTTQEEDGCSCRFPEEEEGGCELRVKFSRSADAPAYQQGQNQLYNELNLGRREEYDVLDKRRGRDPEMGGKPRRKNPQEGLYNELQKDKMAEAYSEIGMKGERRRGKGHDGLYQGLSTATKDTYDALHMQALPPR

SEQ ID NO: 8199 - protein, 487 aa, Artificial Sequence
  source: /note="Description of Artificial Sequence: Synthetic Chimeric Antigen Receptor"
MALPVTALLLPLALLLHAARPQVQLQQSRPELVKPGASVKMSCKASGYTFTDYVISWVKQRTGQGLEWIGEIYPGSNSIYYNEKFKGRATLTADKSSSTAYMQLSSLTSEDSAVYFCAMGGNYGFDYWGQGTTLTVSSGGGGSGGGGSGGGGSQIVLTQSPAIMSASLGERVTLTCTASSSVNSNYLHWYQQKPGSSPKLWIYSTSNLASGVPARFSGSGSGTSYSLTISSMEAEDAATYYCHQYHRSPLTFGAGTKLELKTTTPAPRPPTPAPTIASQPLSLRPEACRPAAGGAVHTRGLDFACDIISFFLALTSTALLFLLFFLTLRFSVVKRGRKKLLYIFKQPFMRPVQTTQEEDGCSCRFPEEEEGGCELRVKFSRSADAPAYQQGQNQLYNELNLGRREEYDVLDKRRGRDPEMGGKPRRKNPQEGLYNELQKDKMAEAYSEIGMKGERRRGKGHDGLYQGLSTATKDTYDALHMQALPPR

SEQ ID NO: 8200 - protein, 670 aa, Artificial Sequence
  source: /note="Description of Artificial Sequence: Synthetic Chimeric Antigen Receptor"
MALPVTALLLPLALLLHAARPQVQLQQSRPELVKPGASVKMSCKASGYTFTDYVISWVKQRTGQGLEWIGEIYPGSNSIYYNEKFKGRATLTADKSSSTAYMQLSSLTSEDSAVYFCAMGGNYGFDYWGQGTTLTVSSGGGGSGGGGSGGGGSQIVLTQSPAIMSASLGERVTLTCTASSSVNSNYLHWYQQKPGSSPKLWIYSTSNLASGVPARFSGSGSGTSYSLTISSMEAEDAATYYCHQYHRSPLTFGAGTKLELKEPKSPDKTHTCPPCPAPPVAGPSVFLFPPKPKDTLMIARTPEVTCVVVDVSHEDPEVKFNWYVDGVEVHNAKTKPREEQYNSTYRVVSVLTVLHQDWLNGKEYKCKVSNKALPAPIEKTISKAKGQPREPQVYTLPPSRDELTKNQVSLTCLVKGFYPSDIAVEWESNGQPENNYKTTPPVLDSDGSFFLYSKLTVDKSRWQQGNVFSCSVMHEALHNHYTQKSLSLSPGKIYIWAPLAGTCGVLLLSLVITLYCKRGRKKLLYIFKQPFMRPVQTTQEEDGCSCRFPEEEEGGCELRVKFSRSADAPAYQQGQNQLYNELNLGRREEYDVLDKRRGRDPEMGGKPRRKNPQEGLYNELQKDKMAEAYSEIGMKGERRRGKGHDGLYQGLSTATKDTYDALHMQALPPR

SEQ ID NO: 8201 - protein, 673 aa, Artificial Sequence
  source: /note="Description of Artificial Sequence: Synthetic Chimeric Antigen Receptor"
MALPVTALLLPLALLLHAARPQVQLQQSRPELVKPGASVKMSCKASGYTFTDYVISWVKQRTGQGLEWIGEIYPGSNSIYYNEKFKGRATLTADKSSSTAYMQLSSLTSEDSAVYFCAMGGNYGFDYWGQGTTLTVSSGGGGSGGGGSGGGGSQIVLTQSPAIMSASLGERVTLTCTASSSVNSNYLHWYQQKPGSSPKLWIYSTSNLASGVPARFSGSGSGTSYSLTISSMEAEDAATYYCHQYHRSPLTFGAGTKLELKEPKSPDKTHTCPPCPAPPVAGPSVFLFPPKPKDTLMIARTPEVTCVVVDVSHEDPEVKFNWYVDGVEVHNAKTKPREEQYNSTYRVVSVLTVLHQDWLNGKEYKCKVSNKALPAPIEKTISKAKGQPREPQVYTLPPSRDELTKNQVSLTCLVKGFYPSDIAVEWESNGQPENNYKTTPPVLDSDGSFFLYSKLTVDKSRWQQGNVFSCSVMHEALHNHYTQKSLSLSPGKIISFFLALTSTALLFLLFFLTLRFSVVKRGRKKLLYIFKQPFMRPVQTTQEEDGCSCRFPEEEEGGCELRVKFSRSADAPAYQQGQNQLYNELNLGRREEYDVLDKRRGRDPEMGGKPRRKNPQEGLYNELQKDKMAEAYSEIGMKGERRRGKGHDGLYQGLSTATKDTYDALHMQALPPR

SEQ ID NO: 8202 - protein, 459 aa, Artificial Sequence
  source: /note="Description of Artificial Sequence: Synthetic Chimeric Antigen Receptor"
MALPVTALLLPLALLLHAARPEVQLVESGGGLVQPKGSLKLSCAASGFTFNTYAMNWVRQAPGKGLEWVARIRSKSNNYATYYADSVKDRFTISRDDSQSMLYLQMNNLKTEDTAMYYCVRQWDYDVRAMNYWGQGTSVTVSSGGGGSGGGGSGGGGSDIVMTQSHIFMSTSVGDRVSITCKASQDVDTAVAWYQQKPGQSPKLLIYWASTRLTGVPDRFTGSGSGTDFTLTISNVQSEDLADYFCQQYSSYPYTFGGGTKLEIKGLAVSTISSFFPPGYQIYIWAPLAGTCGVLLLSLVITLYCKRGRKKLLYIFKQPFMRPVQTTQEEDGCSCRFPEEEEGGCELRVKFSRSADAPAYQQGQNQLYNELNLGRREEYDVLDKRRGRDPEMGGKPRRKNPQEGLYNELQKDKMAEAYSEIGMKGERRRGKGHDGLYQGLSTATKDTYDALHMQALPPR

SEQ ID NO: 8203 - protein, 462 aa, Artificial Sequence
  source: /note="Description of Artificial Sequence: Synthetic Chimeric Antigen Receptor"
MALPVTALLLPLALLLHAARPEVQLVESGGGLVQPKGSLKLSCAASGFTFNTYAMNWVRQAPGKGLEWVARIRSKSNNYATYYADSVKDRFTISRDDSQSMLYLQMNNLKTEDTAMYYCVRQWDYDVRAMNYWGQGTSVTVSSGGGGSGGGGSGGGGSDIVMTQSHIFMSTSVGDRVSITCKASQDVDTAVAWYQQKPGQSPKLLIYWASTRLTGVPDRFTGSGSGTDFTLTISNVQSEDLADYFCQQYSSYPYTFGGGTKLEIKGLAVSTISSFFPPGYQIISFFLALTSTALLFLLFFLTLRFSVVKRGRKKLLYIFKQPFMRPVQTTQEEDGCSCRFPEEEEGGCELRVKFSRSADAPAYQQGQNQLYNELNLGRREEYDVLDKRRGRDPEMGGKPRRKNPQEGLYNELQKDKMAEAYSEIGMKGERRRGKGHDGLYQGLSTATKDTYDALHMQALPPR

SEQ ID NO: 8204 - protein, 488 aa, Artificial Sequence
  source: /note="Description of Artificial Sequence: Synthetic Chimeric Antigen Receptor"
MALPVTALLLPLALLLHAARPEVQLVESGGGLVQPKGSLKLSCAASGFTFNTYAMNWVRQAPGKGLEWVARIRSKSNNYATYYADSVKDRFTISRDDSQSMLYLQMNNLKTEDTAMYYCVRQWDYDVRAMNYWGQGTSVTVSSGGGGSGGGGSGGGGSDIVMTQSHIFMSTSVGDRVSITCKASQDVDTAVAWYQQKPGQSPKLLIYWASTRLTGVPDRFTGSGSGTDFTLTISNVQSEDLADYFCQQYSSYPYTFGGGTKLEIKTTTPAPRPPTPAPTIASQPLSLRPEACRPAAGGAVHTRGLDFACDIYIWAPLAGTCGVLLLSLVITLYCKRGRKKLLYIFKQPFMRPVQTTQEEDGCSCRFPEEEEGGCELRVKFSRSADAPAYQQGQNQLYNELNLGRREEYDVLDKRRGRDPEMGGKPRRKNPQEGLYNELQKDKMAEAYSEIGMKGERRRGKGHDGLYQGLSTATKDTYDALHMQALPPR

SEQ ID NO: 8205 - protein, 491 aa, Artificial Sequence
  source: /note="Description of Artificial Sequence: Synthetic Chimeric Antigen Receptor"
MALPVTALLLPLALLLHAARPEVQLVESGGGLVQPKGSLKLSCAASGFTFNTYAMNWVRQAPGKGLEWVARIRSKSNNYATYYADSVKDRFTISRDDSQSMLYLQMNNLKTEDTAMYYCVRQWDYDVRAMNYWGQGTSVTVSSGGGGSGGGGSGGGGSDIVMTQSHIFMSTSVGDRVSITCKASQDVDTAVAWYQQKPGQSPKLLIYWASTRLTGVPDRFTGSGSGTDFTLTISNVQSEDLADYFCQQYSSYPYTFGGGTKLEIKTTTPAPRPPTPAPTIASQPLSLRPEACRPAAGGAVHTRGLDFACDIISFFLALTSTALLFLLFFLTLRFSVVKRGRKKLLYIFKQPFMRPVQTTQEEDGCSCRFPEEEEGGCELRVKFSRSADAPAYQQGQNQLYNELNLGRREEYDVLDKRRGRDPEMGGKPRRKNPQEGLYNELQKDKMAEAYSEIGMKGERRRGKGHDGLYQGLSTATKDTYDALHMQALPPR

SEQ ID NO: 8206 - protein, 674 aa, Artificial Sequence
  source: /note="Description of Artificial Sequence: Synthetic Chimeric Antigen Receptor"
MALPVTALLLPLALLLHAARPEVQLVESGGGLVQPKGSLKLSCAASGFTFNTYAMNWVRQAPGKGLEWVARIRSKSNNYATYYADSVKDRFTISRDDSQSMLYLQMNNLKTEDTAMYYCVRQWDYDVRAMNYWGQGTSVTVSSGGGGSGGGGSGGGGSDIVMTQSHIFMSTSVGDRVSITCKASQDVDTAVAWYQQKPGQSPKLLIYWASTRLTGVPDRFTGSGSGTDFTLTISNVQSEDLADYFCQQYSSYPYTFGGGTKLEIKEPKSPDKTHTCPPCPAPPVAGPSVFLFPPKPKDTLMIARTPEVTCVVVDVSHEDPEVKFNWYVDGVEVHNAKTKPREEQYNSTYRVVSVLTVLHQDWLNGKEYKCKVSNKALPAPIEKTISKAKGQPREPQVYTLPPSRDELTKNQVSLTCLVKGFYPSDIAVEWESNGQPENNYKTTPPVLDSDGSFFLYSKLTVDKSRWQQGNVFSCSVMHEALHNHYTQKSLSLSPGKIYIWAPLAGTCGVLLLSLVITLYCKRGRKKLLYIFKQPFMRPVQTTQEEDGCSCRFPEEEEGGCELRVKFSRSADAPAYQQGQNQLYNELNLGRREEYDVLDKRRGRDPEMGGKPRRKNPQEGLYNELQKDKMAEAYSEIGMKGERRRGKGHDGLYQGLSTATKDTYDALHMQALPPR

SEQ ID NO: 8207 - protein, 677 aa, Artificial Sequence
  source: /note="Description of Artificial Sequence: Synthetic Chimeric Antigen Receptor"
MALPVTALLLPLALLLHAARPEVQLVESGGGLVQPKGSLKLSCAASGFTFNTYAMNWVRQAPGKGLEWVARIRSKSNNYATYYADSVKDRFTISRDDSQSMLYLQMNNLKTEDTAMYYCVRQWDYDVRAMNYWGQGTSVTVSSGGGGSGGGGSGGGGSDIVMTQSHIFMSTSVGDRVSITCKASQDVDTAVAWYQQKPGQSPKLLIYWASTRLTGVPDRFTGSGSGTDFTLTISNVQSEDLADYFCQQYSSYPYTFGGGTKLEIKEPKSPDKTHTCPPCPAPPVAGPSVFLFPPKPKDTLMIARTPEVTCVVVDVSHEDPEVKFNWYVDGVEVHNAKTKPREEQYNSTYRVVSVLTVLHQDWLNGKEYKCKVSNKALPAPIEKTISKAKGQPREPQVYTLPPSRDELTKNQVSLTCLVKGFYPSDIAVEWESNGQPENNYKTTPPVLDSDGSFFLYSKLTVDKSRWQQGNVFSCSVMHEALHNHYTQKSLSLSPGKIISFFLALTSTALLFLLFFLTLRFSVVKRGRKKLLYIFKQPFMRPVQTTQEEDGCSCRFPEEEEGGCELRVKFSRSADAPAYQQGQNQLYNELNLGRREEYDVLDKRRGRDPEMGGKPRRKNPQEGLYNELQKDKMAEAYSEIGMKGERRRGKGHDGLYQGLSTATKDTYDALHMQALPPR

SEQ ID NO: 8208 - protein, 489 aa, Artificial Sequence; identical to SEQ ID NO: 8184
  source: /note="Description of Artificial Sequence: Synthetic Chimeric Antigen Receptor"

SEQ ID NO: 8209 - protein, 730 aa, Artificial Sequence
  source: /note="Description of Artificial Sequence: Synthetic Chimeric Antigen Receptor"
MALPVTALLLPLALLLHAARPQVTLKESGPGILKPSQTLSLTCSFSGFSLSTSGMGVGWIRQPSGKGLEWLAHIWWDDDKYYNPSLKSQLTISKDTSRNQVFLKITSVDTADTATYYCSRRPRGTMDAMDYWGQGTSVTVSSGGGGSGGGGSGGGGSDIVMTQAASSLSASLGDRVTISCRASQDISKYLNWYQQKPDGTVKLLIYYTSRLHSGVPSRFSGSGSGTDYSLTIRNLEQEDIATYFCQQVYTLPWTFGGGTKLEIKLEDPAEPKSPDKTHTCPPCPAPELLGGPSVFLFPPKPKDTLMISRTPEVTCVVVDVSHEDPEVKFNWYVDGVEVHNAKTKPREEQYNSTYRVVSVLTVLHQDWLNGKEYKCKVSNKALPAPIEKTISKAKGQPREPQVYTLPPSRDELTKNQVSLTCLVKGFYPSDIAVEWESNGQPENNYKTTPPVLDSDGSFFLYSKLTVDKSRWQQGNVFSCSVMHEALHNHYTQKSLSLSPGKKDPKSGTTTPAPRPPTPAPTIASQPLSLRPEACRPAAGGAVHTRGLDFACDIYIWAPLAGTCGVLLLSLVITLYCKRGRKKLLYIFKQPFMRPVQTTQEEDGCSCRFPEEEEGGCELRVKFSRSADAPAYKQGQNQLYNELNLGRREEYDVLDKRRGRDPEMGGKPRRKNPQEGLYNELQKDKMAEAYSEIGMKGERRRGKGHDGLYQGLSTATKDTYDALHMQALPPR

SEQ ID NO: 8210 - protein, 491 aa, Artificial Sequence
  source: /note="Description of Artificial Sequence: Synthetic Chimeric Antigen Receptor"
MALPVTALLLPLALLLHAARPQVTLKESGPGILKPSQTLSLTCSFSGFSLNTSGMGVGWIRQPSGKGLEWLAHIWWDDDKYYNPSLKSQLTISKDTSRNQVFLKITSVDTADSATYYCARRASHVSTVDSFDFWGQGTTLTVSSGGGGSGGGGSGGGGSDIQMTQTTSSLSASLGDRVTISCRASQDISNYLNWFQQKPDGTVKLLIYYTSRLHSGVPSKFSGSGSGTDYSLTISNLEQEDIATYFCQQGYTLPWTFGGGTKLEIKSGTTTPAPRPPTPAPTIASQPLSLRPEACRPAAGGAVHTRGLDFACDIYIWAPLAGTCGVLLLSLVITLYCKRGRKKLLYIFKQPFMRPVQTTQEEDGCSCRFPEEEEGGCELRVKFSRSADAPAYKQGQNQLYNELNLGRREEYDVLDKRRGRDPEMGGKPRRKNPQEGLYNELQKDKMAEAYSEIGMKGERRRGKGHDGLYQGLSTATKDTYDALHMQALPPR

SEQ ID NO: 8211 - protein, 732 aa, Artificial Sequence
  source: /note="Description of Artificial Sequence: Synthetic Chimeric Antigen Receptor"
MALPVTALLLPLALLLHAARPQVTLKESGPGILKPSQTLSLTCSFSGFSLNTSGMGVGWIRQPSGKGLEWLAHIWWDDDKYYNPSLKSQLTISKDTSRNQVFLKITSVDTADSATYYCARRASHVSTVDSFDFWGQGTTLTVSSGGGGSGGGGSGGGGSDIQMTQTTSSLSASLGDRVTISCRASQDISNYLNWFQQKPDGTVKLLIYYTSRLHSGVPSKFSGSGSGTDYSLTISNLEQEDIATYFCQQGYTLPWTFGGGTKLEIKLEDPAEPKSPDKTHTCPPCPAPELLGGPSVFLFPPKPKDTLMISRTPEVTCVVVDVSHEDPEVKFNWYVDGVEVHNAKTKPREEQYNSTYRVVSVLTVLHQDWLNGKEYKCKVSNKALPAPIEKTISKAKGQPREPQVYTLPPSRDELTKNQVSLTCLVKGFYPSDIAVEWESNGQPENNYKTTPPVLDSDGSFFLYSKLTVDKSRWQQGNVFSCSVMHEALHNHYTQKSLSLSPGKKDPKSGTTTPAPRPPTPAPTIASQPLSLRPEACRPAAGGAVHTRGLDFACDIYIWAPLAGTCGVLLLSLVITLYCKRGRKKLLYIFKQPFMRPVQTTQEEDGCSCRFPEEEEGGCELRVKFSRSADAPAYKQGQNQLYNELNLGRREEYDVLDKRRGRDPEMGGKPRRKNPQEGLYNELQKDKMAEAYSEIGMKGERRRGKGHDGLYQGLSTATKDTYDALHMQALPPR

SEQ ID NO: 8212 - protein, 468 aa, Artificial Sequence
  source: /note="Description of Artificial Sequence: Synthetic Chimeric Antigen Receptor"
QVTLKESGPGILKPSQTLSLTCSFSGFSLSTSGMGVGWIRQPSGKGLEWLAHIWWDDDKYYNPSLKSQLTISKDTSRNQVFLKITSVDTADTATYYCSRRPRGTMDAMDYWGQGTSVTVSSGGGGSGGGGSGGGGSDIVMTQAASSLSASLGDRVTISCRASQDISKYLNWYQQKPDGTVKLLIYYTSRLHSGVPSRFSGSGSGTDYSLTIRNLEQEDIATYFCQQVYTLPWTFGGGTKLEIKSGTTTPAPRPPTPAPTIASQPLSLRPEACRPAAGGAVHTRGLDFACDIYIWAPLAGTCGVLLLSLVITLYCKRGRKKLLYIFKQPFMRPVQTTQEEDGCSCRFPEEEEGGCELRVKFSRSADAPAYKQGQNQLYNELNLGRREEYDVLDKRRGRDPEMGGKPRRKNPQEGLYNELQKDKMAEAYSEIGMKGERRRGKGHDGLYQGLSTATKDTYDALHMQALPPR

SEQ ID NO: 8213 - protein, 709 aa, Artificial Sequence
  source: /note="Description of Artificial Sequence: Synthetic Chimeric Antigen Receptor"
QVTLKESGPGILKPSQTLSLTCSFSGFSLSTSGMGVGWIRQPSGKGLEWLAHIWWDDDKYYNPSLKSQLTISKDTSRNQVFLKITSVDTADTATYYCSRRPRGTMDAMDYWGQGTSVTVSSGGGGSGGGGSGGGGSDIVMTQAASSLSASLGDRVTISCRASQDISKYLNWYQQKPDGTVKLLIYYTSRLHSGVPSRFSGSGSGTDYSLTIRNLEQEDIATYFCQQVYTLPWTFGGGTKLEIKLEDPAEPKSPDKTHTCPPCPAPELLGGPSVFLFPPKPKDTLMISRTPEVTCVVVDVSHEDPEVKFNWYVDGVEVHNAKTKPREEQYNSTYRVVSVLTVLHQDWLNGKEYKCKVSNKALPAPIEKTISKAKGQPREPQVYTLPPSRDELTKNQVSLTCLVKGFYPSDIAVEWESNGQPENNYKTTPPVLDSDGSFFLYSKLTVDKSRWQQGNVFSCSVMHEALHNHYTQKSLSLSPGKKDPKSGTTTPAPRPPTPAPTIASQPLSLRPEACRPAAGGAVHTRGLDFACDIYIWAPLAGTCGVLLLSLVITLYCKRGRKKLLYIFKQPFMRPVQTTQEEDGCSCRFPEEEEGGCELRVKFSRSADAPAYKQGQNQLYNELNLGRREEYDVLDKRRGRDPEMGGKPRRKNPQEGLYNELQKDKMAEAYSEIGMKGERRRGKGHDGLYQGLSTATKDTYDALHMQALPPR

SEQ ID NO: 8214 - protein, 470 aa, Artificial Sequence
  source: /note="Description of Artificial Sequence: Synthetic Chimeric Antigen Receptor"
QVTLKESGPGILKPSQTLSLTCSFSGFSLNTSGMGVGWIRQPSGKGLEWLAHIWWDDDKYYNPSLKSQLTISKDTSRNQVFLKITSVDTADSATYYCARRASHVSTVDSFDFWGQGTTLTVSSGGGGSGGGGSGGGGSDIQMTQTTSSLSASLGDRVTISCRASQDISNYLNWFQQKPDGTVKLLIYYTSRLHSGVPSKFSGSGSGTDYSLTISNLEQEDIATYFCQQGYTLPWTFGGGTKLEIKSGTTTPAPRPPTPAPTIASQPLSLRPEACRPAAGGAVHTRGLDFACDIYIWAPLAGTCGVLLLSLVITLYCKRGRKKLLYIFKQPFMRPVQTTQEEDGCSCRFPEEEEGGCELRVKFSRSADAPAYKQGQNQLYNELNLGRREEYDVLDKRRGRDPEMGGKPRRKNPQEGLYNELQKDKMAEAYSEIGMKGERRRGKGHDGLYQGLSTATKDTYDALHMQALPPR

SEQ ID NO: 8215 - protein, 711 aa, Artificial Sequence
  source: /note="Description of Artificial Sequence: Synthetic Chimeric Antigen Receptor"
QVTLKESGPGILKPSQTLSLTCSFSGFSLNTSGMGVGWIRQPSGKGLEWLAHIWWDDDKYYNPSLKSQLTISKDTSRNQVFLKITSVDTADSATYYCARRASHVSTVDSFDFWGQGTTLTVSSGGGGSGGGGSGGGGSDIQMTQTTSSLSASLGDRVTISCRASQDISNYLNWFQQKPDGTVKLLIYYTSRLHSGVPSKFSGSGSGTDYSLTISNLEQEDIATYFCQQGYTLPWTFGGGTKLEIKLEDPAEPKSPDKTHTCPPCPAPELLGGPSVFLFPPKPKDTLMISRTPEVTCVVVDVSHEDPEVKFNWYVDGVEVHNAKTKPREEQYNSTYRVVSVLTVLHQDWLNGKEYKCKVSNKALPAPIEKTISKAKGQPREPQVYTLPPSRDELTKNQVSLTCLVKGFYPSDIAVEWESNGQPENNYKTTPPVLDSDGSFFLYSKLTVDKSRWQQGNVFSCSVMHEALHNHYTQKSLSLSPGKKDPKSGTTTPAPRPPTPAPTIASQPLSLRPEACRPAAGGAVHTRGLDFACDIYIWAPLAGTCGVLLLSLVITLYCKRGRKKLLYIFKQPFMRPVQTTQEEDGCSCRFPEEEEGGCELRVKFSRSADAPAYKQGQNQLYNELNLGRREEYDVLDKRRGRDPEMGGKPRRKNPQEGLYNELQKDKMAEAYSEIGMKGERRRGKGHDGLYQGLSTATKDTYDALHMQALPPR

SEQ ID NO: 8216 - protein, 546 aa, Artificial Sequence
  source: /note="Description of Artificial Sequence: Synthetic Chimeric Antigen Receptor"
MDFQVQIFSFLLISASVIMSRGDIQMTQSPSSVSASIGDRVTITCRASQGIDNWLGWYQQKPGKAPKLLIYDASNLDTGVPSRFSGSGSGTYFTLTISSLQAEDFAVYFCQQAKAFPPTFGGGTKVDIKGSTSGSGKPGSGEGSEVQLVQSGGGLVKPGGSLRLSCAASGFTFSSYSMNWVRQAPGKGLEWVSSISSSSSYIYYADSVKGRFTISRDNAKNSLYLQMNSLRAEDTAVYYCARVTDAFDIWGQGTMVTVSSAAAFVPVFLPAKPTTTPAPRPPTPAPTIASQPLSLRPEACRPAAGGAVHTRGLDFACDIYIWAPLAGTCGVLLLSLVITLYCNHRNRSKRSRLLHSDYMNMTPRRPGPTRKHYQPYAPPRDFAAYRSRFSVVKRGRKKLLYIFKQPFMRPVQTTQEEDGCSCRFPEEEEGGCELRVKFSRSADAPAYQQGQNQLYNELNLGRREEYDVLDKRRGRDPEMGGKPRRKNPQEGLYNELQKDKMAEAYSEIGMKGERRRGKGHDGLYQGLSTATKDTYDALHMQALPPR

SEQ ID NO: 8217 - protein, 730 aa, Artificial Sequence; identical to SEQ ID NO: 8209
  source: /note="Description of Artificial Sequence: Synthetic Chimeric Antigen Receptor"

SEQ ID NO: 8218 - protein, 491 aa, Artificial Sequence; identical to SEQ ID NO: 8210
  source: /note="Description of Artificial Sequence: Synthetic Chimeric Antigen Receptor"

SEQ ID NO: 8219 - protein, 732 aa, Artificial Sequence; identical to SEQ ID NO: 8211
  source: /note="Description of Artificial Sequence: Synthetic Chimeric Antigen Receptor"

SEQ ID NO: 8220 - protein, 468 aa, Artificial Sequence; identical to SEQ ID NO: 8212
  source: /note="Description of Artificial Sequence: Synthetic Chimeric Antigen Receptor"

SEQ ID NO: 8221 - protein, 709 aa, Artificial Sequence; identical to SEQ ID NO: 8213
  source: /note="Description of Artificial Sequence: Synthetic Chimeric Antigen Receptor"

SEQ ID NO: 8222 - protein, 709 aa, Artificial Sequence; identical to SEQ ID NO: 8213
  source: /note="Description of Artificial Sequence: Synthetic Chimeric Antigen Receptor"

SEQ ID NO: 8223 - protein, 711 aa, Artificial Sequence; identical to SEQ ID NO: 8215
  source: /note="Description of Artificial Sequence: Synthetic Chimeric Antigen Receptor"

SEQ ID NO: 8224 - protein, 726 aa, Artificial Sequence
  source: /note="Description of Artificial Sequence: Synthetic Chimeric Antigen Receptor"
LLVTSLLLCELPHPAFLLIPDTDVKLQESGPGLVAPSQSLSITCTVSGFSLTSYAVSWVRQPPGKGLEWLGIIWSGGATNYNSALKSRLSISKDNSKSQVFLKMNGLQTDDTARYYCAREHYYGSSAMDYWGQGASITVSSGGGGSGGGGSGGGGSGIVMTQSPLSLPVSLGDQASISCRSSQSIVHSYGNTYLFWYLQKPGQSPKLLIYRVSNRFSGVPDRFSGSGSGTNFTLKISRVEAEDMGVYYCFQGTHVPYTFGGGTKLEIKEPKSCDKTHTCPPCPAPELLGGPSVFLFPPKPKDTLMISRTPEVTCVVVDVSHEDPEVKFNWYVDGVEVHNAKTKPREEQYNSTYRVVSVLTVLHQDWLNGKEYKCKVSNKALPAPIEKTISKAKGQPREPQVYTLPPSRDELTKNQVSLTCLVKGFYPSDIAVEWESNGQPENNYKTTPPVLDSDGSFFLYSKLTVDKSRWQQGNVFSCSVMHEALHNHYTQKSLSLSPGKKDPKAAAIEVMYPPPYLDNEKSNGTIIHVKGKHLCPSPLFPGPSKPFWVLVVVGGVLACYSLLVTVAFIIFWVRSKRSRLLHSDYMNMTPRRPGPTRKHYQPYAPPRDFAAYRSRVKFSRSADAPAYQQGQNQLYNELNLGRREEYDVLDKRRGRDPEMGGKPRRKNPQEGLYNELQKDKMAEAYSEIGMKGERRRGKGHDGLYQGLSTATKDTYDALHMQALPPR

SEQ ID NO: 8225 - protein, 481 aa, Artificial Sequence
  source: /note="Description of Artificial Sequence: Synthetic Chimeric Antigen Receptor"
MDFQVQIFSFLLISASVIMSRGDIQMTQSPSSVSASIGDRVTITCRASQGIDNWLGWYQQKPGKAPKLLIYDASNLDTGVPSRFSGSGSGTYFTLTISSLQAEDFAVYFCQQAKAFPPTFGGGTKVDIKGSTSGSGKPGSGEGSEVQLVQSGGGLVKPGGSLRLSCAASGFTFSSYSMNWVRQAPGKGLEWVSSISSSSSYIYYADSVKGRFTISRDNAKNSLYLQMNSLRAEDTAVYYCARVTDAFDIWGQGTMVTVSSAAAIEVMYPPPYLDNEKSNGTIIHVKGKHLCPSPLFPGPSKPFWVLVVVGGVLACYSLLVTVAFIIFWRSKRSRLLHSDYMNMTPRRPGPTRKHYQPYAPPRDFAAYRSRVKFSRSADAPAYQQGQNQLYNELNLGRREEYDVLDKRRGRDPEMGGKPRRKNPQEGLYNELQKDKMAEAYSEIGMKGERRRGKGHDGLYQGLSTATKDTYDALHMQALPPR

SEQ ID NO: 8226 - protein, 539 aa, Artificial Sequence
  source: /note="Description of Artificial Sequence: Synthetic Chimeric Antigen Receptor"
MGWSCIILFLVATATGVHSEVQLVETGGGLVQPGNSLKLSCATSGFIFSTTWMNWIRQTPGKRLEWLAQIEDKSNNYFISYSESVKGRFTISRDDSKSSVYLQMNNLKEEDTAIYYCSWKYRSNYYFDYWGQGVMVTVSSGSTSGSGKPGSGEGSDIVLTQSPALAVSLEQRATISCKTSQNVDYYGISYLHWYQQKPGQQPKLLIYEGSNLASGIPARFSGSGSGTDFTLTIDPVEADDIVTYYCQQSKDYPYTFGAGTKLELKAAATTTKPVLRTPSPVHPTGTSQPQRPEDCRPRGSVKGTGLDFACDIYIWAPLAGICVALLLSLIITLICYHRSRNSRRNRLLQVTTMNMTPRRPGLTRKPYQPYAPARDFAAYRPKWIRKKFPHIFKQPFKKTTGAAQEEDACSCRCPQEEEGGGGGYELRAKFSRSAETAANLQDPNQLYNELNLGRREEYDVLEKKRARDPEMGGKQQRRRNPQEGVYNALQKDKMAEAYSEIGTKGERRRGKGHDGLYQGLSTATKDTYDALHMQTLAPR

SEQ ID NO: 8227 - protein, 494 aa, Artificial Sequence
  source: /note="Description of Artificial Sequence: Synthetic Chimeric Antigen Receptor"
MGWSCIILFLVATATGVHSEVQLVETGGGLVQPGNSLKLSCATSGFIFSTTWMNWIRQTPGKRLEWLAQIEDKSNNYFISYSESVKGRFTISRDDSKSSVYLQMNNLKEEDTAIYYCSWKYRSNYYFDYWGQGVMVTVSSGSTSGSGKPGSGEGSDIVLTQSPALAVSLEQRATISCKTSQNVDYYGISYLHWYQQKPGQQPKLLIYEGSNLASGIPARFSGSGSGTDFTLTIDPVEADDIVTYYCQQSKDYPYTFGAGTKLELKAAATTTKPVLRTPSPVHPTGTSQPQRPEDCRPRGSVKGTGLDFACDIYIWAPLAGICVALLLSLIITLICYHRSRNSRRNRLLQVTTMNMTPRRPGLTRKPYQPYAPARDFAAYRPRAKFSRSAETAANLQDPNQLYNELNLGRREEYDVLEKKRARDPEMGGKQQRRRNPQEGVYNALQKDKMAEAYSEIGTKGERRRGKGHDGLYQGLSTATKDTYDALHMQTLAPR

SEQ ID NO: 8228 - protein, 551 aa, Artificial Sequence
  source: /note="Description of Artificial Sequence: Synthetic Chimeric Antigen Receptor"
MGWSCIILFLVATATGVHSEVQLVETGGGLVQPGNSLKLSCATSGFIFSTTWMNWIRQTPGKRLEWLAQIEDKSNNYFISYSESVKGRFTISRDDSKSSVYLQMNNLKEEDTAIYYCSWKYRSNYYFDYWGQGVMVTVSSGSTSGSGKPGSGEGSDIVLTQSPALAVSLEQRATISCKTSQNVDYYGISYLHWYQQKPGQQPKLLIYEGSNLASGIPARFSGSGSGTDFTLTIDPVEADDIVTYYCQQSKDYPYTFGAGTKLELKAAAFVPVFLPAKPTTTPAPRPPTPAPTIASQPLSLRPEACRPAAGGAVHTRGLDFACDIYIWAPLAGTCGVLLLSLVITLYCNHRNRSKRSRLLHSDYMNMTPRRPGPTRKHYQPYAPPRDFAAYRSRFSVVKRGRKKLLYIFKQPFMRPVQTTQEEDGCSCRFPEEEEGGCELRVKFSRSADAPAYQQGQNQLYNELNLGRREEYDVLDKRRGRDPEMGGKPRRKNPQEGLYNELQKDKMAEAYSEIGMKGERRRGKGHDGLYQGLSTATKDTYDALHMQALPPR

SEQ ID NO: 8229 - protein, 487 aa, Artificial Sequence
  source: /note="Description of Artificial Sequence: Synthetic Chimeric Antigen Receptor"
MGWSCIILFLVATATGVHSEVQLVETGGGLVQPGNSLKLSCATSGFIFSTTWMNWIRQTPGKRLEWLAQIEDKSNNYFISYSESVKGRFTISRDDSKSSVYLQMNNLKEEDTAIYYCSWKYRSNYYFDYWGQGVMVTVSSGSTSGSGKPGSGEGSDIVLTQSPALAVSLEQRATISCKTSQNVDYYGISYLHWYQQKPGQQPKLLIYEGSNLASGIPARFSGSGSGTDFTLTIDPVEADDIVTYYCQQSKDYPYTFGAGTKLELKAAAIEVMYPPPYLDNEKSNGTIIHVKGKHLCPSPLFPGPSKPFWVLVVVGGVLACYSLLVTVAFIIFWVRSKRSRLLHSDYMNMTPRRPGPTRKHYQPYAPPRDFAAYRSRVKFSRSADAPAYQQGQNQLYNELNLGRREEYDVLDKRRGRDPEMGGKPRRKNPQEGLYNELQKDKMAEAYSEIGMKGERRRGKGHDGLYQGLSTATKDTYDALHMQALPPR

SEQ ID NO: 8230 - protein, 504 aa, Artificial Sequence; identical to SEQ ID NO: 7852
  source: /note="Description of Artificial Sequence: Synthetic Chimeric Antigen Receptor"

SEQ ID NO: 8231 - protein, 491 aa, Artificial Sequence; identical to SEQ ID NO: 7853
  source: /note="Description of Artificial Sequence: Synthetic Chimeric Antigen Receptor"

SEQ ID NO: 8232 - protein, 614 aa, Artificial Sequence; identical to SEQ ID NO: 6864
  source: /note="Description of Artificial Sequence: Synthetic Chimeric Antigen Receptor"

SEQ ID NO: 8233 - protein, 242 aa, Artificial Sequence; identical to SEQ ID NO: 5760
  source: /note="Description of Artificial Sequence: Synthetic CD19 scFv sequence"

SEQ ID NO: 8234 - protein, 45 aa, Homo sapiens; identical to SEQ ID NO: 6741

SEQ ID NO: 8235 - protein, 69 aa, Homo sapiens; identical to SEQ ID NO: 6747

SEQ ID NO: 8236 - protein, 112 aa, Homo sapiens; identical to SEQ ID NO: 6643

SEQ ID NO: 8237 - protein, 42 aa, Homo sapiens; identical to SEQ ID NO: 6577

SEQ ID NO: 8238 - protein, 9 aa, Artificial Sequence
  source: /note="Description of Artificial Sequence: Synthetic Tag"
YPYDVPDYA

SEQ ID NO: 8239 - protein, 20 aa, Artificial Sequence
  source: /note="Description of Artificial Sequence: Synthetic Cleavage site"
GATNFSLLKQAGDVEENPGP

SEQ ID NO: 8240 - protein, 235 aa, Artificial Sequence
  source: /note="Description of Artificial Sequence: Synthetic Payload sequence"
LSKGEEDNMAIIKEFMRFKVHMEGSVNGHEFEIEGEGEGRPYEGTQTAKLKVTKGGPLPFAWDILSPQFMYGSKAYVKHPADIPDYLKLSFPEGFKWERVMNFEDGGVVTVTQDSSLQDGEFIYKVKLRGTNFPSDGPVMQKKTMGWEASSERMYPEDGALKGEIKQRLKLKDGGHYDAEVKTTYKAKKPVQLPGAYNVNIKLDITSHNEDYTIVEQYERAEGRHSTGGMDELYK

SEQ ID NO: 8241 - DNA, 726 bp, Artificial Sequence
  source: /note="Description of Artificial Sequence: Synthetic CD19 scFv sequence"
gacatccagatgacacagaccacaagctccctgtccgcctctctgggcgacagagtgaccatcagctgccgggcctcccaggatatctctaagtatctgaactggtaccagcagaagcccgatggcacagtgaagctgctgatctatcacaccagccgcctgcactccggagtgccttctaggttcagcggctccggctctggcacagactacagcctgaccatctccaacctggagcaggaggatatcgccacctatttctgccagcagggcaatacactgccttacacctttggcggcggcacaaagctggagatcaccggaggaggaggcagcggaggaggaggctccggcggcggcggctctgaggtgaagctgcaggagtccggaccaggcctggtggcacctagccagtccctgtctgtgacatgtaccgtgtccggcgtgtctctgccagactacggcgtgtcttggatcaggcagccacctaggaagggcctggagtggctgggcgtgatctggggcagcgagacaacatactataattctgccctgaagagcagactgacaatcatcaaggacaacagcaagtcccaggtgttcctgaagatgaatagcctgcagacagacgataccgccatctactattgcgccaagcactactattacggcggcagctatgccatggattactggggccagggcacatccgtgaccgtgtctagc

SEQ ID NO: 8242 - DNA, 726 bp, Artificial Sequence
  source: /note="Description of Artificial Sequence: Synthetic CD19 scFv sequence"
gacatccagatgacacagaccacaagctccctgagcgcctccctgggcgacagagtgaccatctcttgccgggccagccaggatatctccaagtatctgaactggtaccagcagaagcccgatggcacagtgaagctgctgatctatcacacctctcgcctgcacagcggcgtgccttccaggttctctggcagcggctccggcacagactactctctgaccatcagcaacctggagcaggaggatatcgccacctatttctgccagcagggcaatacactgccctacacctttggcggcggcacaaagctggagatcaccggcggcggcggctctggaggaggaggcagcggcggaggaggctccgaggtgaagctgcaggagtccggaccaggcctggtggcaccatctcagagcctgtccgtgacatgtaccgtgagcggcgtgtccctgcctgactacggcgtgagctggatcagacagccacctaggaagggcctggagtggctgggcgtgatctggggctccgagacaacatactataactccgccctgaagtctcggctgaccatcatcaaggacaactctaagagccaggtgttcctgaagatgaattccctgcagacagacgataccgccatctactattgcgccaagcactactattacggcggctcctatgccatggattactggggccagggcacatctgtgaccgtgtctagc

SEQ ID NO: 8243 - DNA, 726 bp, Artificial Sequence
  source: /note="Description of Artificial Sequence: Synthetic CD19 scFv sequence"
gacatccagatgacacagaccacaagctccctgagcgcctccctgggcgacagagtgaccatcagctgccgggcctcccaggatatctctaagtatctgaactggtaccagcagaagccagatggcacagtgaagctgctgatctatcacaccagccgcctgcactccggagtgccctctaggttctctggcagcggctccggcacagactacagcctgaccatctccaacctggagcaggaggatatcgccacctatttctgccagcagggcaatacactgccatacacctttggcggcggcacaaagctggagatcaccggaggaggaggcagcggaggaggaggctccggcggcggcggctctgaggtgaagctgcaggagtccggaccaggcctggtggcaccttctcagagcctgtccgtgacatgtaccgtgtctggcgtgagcctgcccgactacggcgtgtcttggatcagacagccacctaggaagggcctggagtggctgggcgtgatctggggcagcgagacaacatactataattctgccctgaagagcaggctgaccatcatcaaggacaactctaagagccaggtgttcctgaagatgaattccctgcagacagacgataccgccatctactattgcgccaagcactactattacggcggctcttatgccatggattactggggccagggcacaagcgtgaccgtgtctagc

SEQ ID NO: 8244 - DNA, 726 bp, Artificial Sequence
  source: /note="Description of Artificial Sequence: Synthetic CD19 scFv sequence"
gacatccagatgacacagaccacaagctccctgagcgcctccctgggcgacagagtgaccatctcttgccgggccagccaggatatctccaagtatctgaactggtaccagcagaagccagatggcacagtgaagctgctgatctatcacacctctcgcctgcacagcggagtgccctccaggttctctggcagcggctccggcacagactactctctgaccatcagcaacctggagcaggaggatatcgccacctatttctgccagcagggcaatacactgccctacacctttggcggcggcacaaagctggagatcaccggcggcggcggctctggaggaggaggcagcggcggaggaggctccgaggtgaagctgcaggagtccggaccaggcctggtggcaccatctcagagcctgtccgtgacatgtaccgtgagcggcgtgtccctgcctgactacggcgtgagctggatcagacagccacctaggaagggcctggagtggctgggcgtgatctggggctccgagacaacatactataattccgccctgaagtctcggctgacaatcatcaaggacaactctaagagccaggtgtttctgaagatgaatagcctgcagacagacgataccgccatctactattgcgccaagcactactattacggcggctcctatgccatggattactggggccagggcacatctgtgaccgtgtctagc

SEQ ID NO: 8245 - DNA, 726 bp, Artificial Sequence
  source: /note="Description of Artificial Sequence: Synthetic CD19 scFv sequence"
gacatccagatgacacagaccacaagctccctgagcgcctccctgggcgacagagtgaccatcagctgccgggcctcccaggatatctctaagtatctgaactggtaccagcagaagccagatggcacagtgaagctgctgatctatcacaccagccgcctgcactccggagtgccctctaggttctctggcagcggctccggcacagactacagcctgaccatctccaacctggagcaggaggatatcgccacctatttctgccagcagggcaatacactgccatacacctttggcggcggcacaaagctggagatcaccggaggaggaggcagcggaggaggaggctccggcggcggcggctctgaggtgaagctgcaggagtccggaccaggcctggtggcaccttctcagagcctgtccgtgacatgtaccgtgtctggcgtgagcctgcccgactacggcgtgtcttggatcagacagccacctaggaagggcctggagtggctgggcgtgatctggggcagcgagacaacatactataattctgccctgaagagcaggctgacaatcatcaaggacaactctaagagccaggtgtttctgaagatgaatagcctgcagacagacgataccgccatctactattgtgccaagcactactattacggcggcagctatgccatggattactggggccagggcacatccgtgaccgtgtctagc

SEQ ID NO: 8246 - DNA, 726 bp, Artificial Sequence
  source: /note="Description of Artificial Sequence: Synthetic CD19 scFv sequence"
gacatccagatgacacagactacatcctccctgtctgcctctctgggagacagagtcaccatcagttgcagggcaagtcaggacattagtaaatatttaaattggtatcagcagaaaccagatggaactgttaaactcctgatctaccatacatcaagattacactcaggagtcccatcaaggttcagtggcagtgggtctggaacagattattctctcaccattagcaacctggagcaagaagatattgccacttacttttgccaacagggtaatacgcttccgtacacgttcggaggggggaccaagctggagatcacaggtggcggtggctcgggcggtggtgggtcgggtggcggcggatctgaggtgaaactgcaggagtcaggacctggcctggtggcgccctcacagagcctgtccgtcacatgcactgtctcaggggtctcattacccgactatggtgtaagctggattcgccagcctccacgaaagggtctggagtggctgggagtaatatggggtagtgaaaccacatactataattcagctctcaaatccagactgaccatcatcaaggacaactccaagagccaagttttcttaaaaatgaacagtctgcaaactgatgacacagccatttactactgtgccaaacattattactacggtggtagctatgctatggactactggggccaaggaacctcagtcaccgtctcctca

SEQ ID NO: 8247 - DNA, 135 bp, Artificial Sequence
  source: /note="Description of Artificial Sequence: Synthetic Construct"
accacaaccccagcacctcgcccaccaacaccagcaccaaccatcgcatcccagccactgtctctgaggcccgaggcatgtaggcctgcagcaggaggcgccgtgcacaccaggggcctggactttgcctgcgat

SEQ ID NO: 8248 - DNA, 135 bp, Artificial Sequence
  source: /note="Description of Artificial Sequence: Synthetic Construct"
acaacaaccccagcacccagacctccaacacctgcaccaaccatcgcaagccagcctctgtccctgaggcccgaggcatgtaggccagcagcaggaggcgccgtgcacacccggggcctggactttgcctgcgat

SEQ ID NO: 8249 - DNA, 135 bp, Artificial Sequence
  source: /note="Description of Artificial Sequence: Synthetic Construct"
accacaaccccagcaccccgcccaccaacacctgcaccaaccatcgcctcccagccactgtctctgaggcccgaggcatgtaggcctgcagcaggaggcgccgtgcacaccaggggcctggactttgcctgcgat

SEQ ID NO: 8250 - DNA, 135 bp, Artificial Sequence
  source: /note="Description of Artificial Sequence: Synthetic Construct"
accacaaccccagcacccagaccaccaacacctgcaccaaccatcgcaagccagcctctgtccctgcgcccagaggcatgcaggccagcagcaggaggagcagtgcacacccggggcctggacttcgcatgtgat

SEQ ID NO: 8251 - DNA, 135 bp, Artificial Sequence
  source: /note="Description of Artificial Sequence: Synthetic Construct"
accacaaccccagcacctcgcccaccaacaccagcaccaaccatcgcatcccagccactgtctctgcgccccgaggcatgcaggcctgcagcaggcggcgccgtgcacaccaggggcctggacttcgcctgtgat

SEQ ID NO: 8252 - DNA, 207 bp, Artificial Sequence
  source: /note="Description of Artificial Sequence: Synthetic Construct"
accacaaccccagcacctcgcccaccaacaccagcaccaaccatcgcatcccagccactgtctctgaggcccgaggcatgtaggcctgcagcaggaggcgccgtgcacaccaggggcctggactttgcctgcgatatctatatctgggcaccactggcaggaacatgtggcgtgctgctgctgtccctggtcatcaccctgtattgc

SEQ ID NO: 8253 - DNA, 207 bp, Artificial Sequence
  source: /note="Description of Artificial Sequence: Synthetic Construct"
accacgacgccagcgccgcgaccaccaacaccggcgcccaccatcgcgtcgcagcccctgtccctgcgcccagaggcgtgccggccagcggcggggggcgcagtgcacacgagggggctggacttcgcctgtgatatctacatctgggcgcccttggccgggacttgtggggtccttctcctgtcactggttatcaccctttactgc

SEQ ID NO: 8254 - DNA, 207 bp, Artificial Sequence
  source: /note="Description of Artificial Sequence: Synthetic Construct"
accacgacgccagcgccgcgaccaccaacaccggcgcccaccatcgcgtcgcagcccctgtccctgcgcccagaggcgtgccggccagcggcggggggcgcagtgcacacgagggggctggacttcgcctgtgatatctacatctgggcgcccttggccgggacttgtggggtccttctcctgtcactggttatcactttactgccc

SEQ ID NO: 8255 - DNA, 338 bp, Artificial Sequence
  source: /note="Description of Artificial Sequence: Synthetic Construct"
agggtgaagttttctaggagcgccgatgcaccagcatataagcagggacagaaccagctgtacaacgagctgaatctgggcaggagagaggagtacgacgtgctggataagaggaggggaagggaccccgagatgggaggcaagccaaggagaaagaacccccaggagggcctgtataatgagctgcagaaggacaagatggccgaggcctactccgagatcggcatgaagggagagcggcgcaggggcaagggacacgatggcctgtatcagggcctgtctacagccaccaaggacacctacgatgcactgcacatgcaggccctgcctccaaggtg

SEQ ID NO: 8256 - DNA, 338 bp, Artificial Sequence
  source: /note="Description of Artificial Sequence: Synthetic Construct"
agggtgaagttttccaggtctgccgatgcccccgcctataagcagggccagaatcagctgtacaacgagctgaatctgggcaggagagaggagtacgacgtgctggataagaggaggggacgcgaccccgagatgggaggcaagcctaggagaaagaacccacaggagggcctgtataatgagctgcagaaggacaagatggccgaggcctactctgagatcggcatgaagggagagcggcgcaggggcaagggacacgatggcctgtatcagggcctgagcacagccaccaaggacacctacgatgcactgcacatgcaggccctgccacctaggtg

SEQ ID NO: 8257 - DNA, 338 bp, Artificial Sequence
  source: /note="Description of Artificial Sequence: Synthetic Construct"
agggtgaagtttagcaggtccgccgatgccccagcctataagcagggccagaaccagctgtacaacgagctgaatctgggcaggagggaagagtacgacgtgctggataagaggagaggaagggaccccgagatgggaggcaagccaaggaggaagaacccacaggagggcctgtataatgagctgcagaaggacaagatggccgaggcctacagcgagatcggcatgaagggagagaggagacggggcaagggacacgatggcctgtatcagggcctgtccacagccaccaaggacacctacgatgcactgcacatgcaggccctgcctccaaggtg

SEQ ID NO: 8258 - DNA, 338 bp, Artificial Sequence
  source: /note="Description of Artificial Sequence: Synthetic Construct"
agggtgaagttttccaggtctgccgatgccccagcctataagcagggccagaatcagctgtacaacgagctgaatctgggcaggagagaggagtacgacgtgctggataagaggaggggacgcgaccccgagatgggaggcaagcctaggagaaagaacccacaggagggcctgtataatgagctgcagaaggacaagatggccgaggcctactctgagatcggcatgaagggagagcggcgcaggggcaagggacacgatggcctgtatcagggcctgagcacagccaccaaggacacctacgatgcactgcacatgcaggccctgccacctaggtg

SEQ ID NO: 8259 - DNA, 338 bp, Artificial Sequence
  source: /note="Description of Artificial Sequence: Synthetic Construct"
agggtgaagtttagcaggtccgccgatgccccagcctataagcagggccagaaccagctgtacaacgagctgaatctgggcaggagggaagagtacgacgtgctggataagaggagaggaagggaccccgagatgggaggcaagccaaggaggaagaacccacaggagggcctgtataatgagctgcagaaggacaagatggccgaggcctactccgagatcggcatgaagggagagaggagacggggcaagggacacgatggcctgtatcagggcctgtctacagccaccaaggacacctacgatgcactgcacatgcaggccctgcctccaaggtg

SEQ ID NO: 8260 - DNA, 336 bp, Artificial Sequence
  source: /note="Description of Artificial Sequence: Synthetic Construct"
agggtgaagttttctaggagcgccgatgcaccagcatataagcagggacagaaccagctgtacaacgagctgaatctgggcaggagagaggagtacgacgtgctggataagaggaggggaagggaccccgagatgggaggcaagccaaggagaaagaacccccaggagggcctgtataatgagctgcagaaggacaagatggccgaggcctactccgagatcggcatgaagggagagcggcgcaggggcaagggacacgatggcctgtatcagggcctgtctacagccaccaaggacacctacgatgcactgcacatgcaggccctgcctccaagg

SEQ ID NO: 8261 - DNA, 336 bp, Artificial Sequence
  source: /note="Description of Artificial Sequence: Synthetic Construct"
agagtgaagttcagcaggagcgcagacgcccccgcgtacaagcagggccagaaccagctctataacgagctcaatctaggacgaagagaggagtacgatgttttggacaagagacgtggccgggaccctgagatggggggaaagccgagaaggaagaaccctcaggaaggcctgtacaatgaactgcagaaagataagatggcggaggcctacagtgagattgggatgaaaggcgagcgccggaggggcaaggggcacgatggcctttaccagggtctcagtacagccaccaaggacacctacgacgcccttcacatgcaggccctgccccctcgc

SEQ ID NO: 8262 - DNA, 126 bp, Artificial Sequence
  source: /note="Description of Artificial Sequence: Synthetic Construct"
aagagaggccggaagaagctgctgtacatcttcaagcagcccttcatgaggcccgtgcagacaacccaggaggaggacggctgcagctgtcggttcccagaggaggaggagggaggatgtgagctg

SEQ ID NO: 8263 - DNA, 126 bp, Artificial Sequence
  source: /note="Description of Artificial Sequence: Synthetic Construct"
aagcgcggcaggaagaagctgctgtacatcttcaagcagccctttatgcgccctgtgcagacaacccaggaggaggacggctgcagctgtaggttcccagaggaggaggagggaggatgtgagctg

SEQ ID NO: 8264 - DNA, 126 bp, Artificial Sequence
  source: /note="Description of Artificial Sequence: Synthetic Construct"
aagcgcggcaggaagaagctgctgtacatcttcaagcagccttttatgcgcccagtgcagacaacccaggaggaggacggctgcagctgtaggttccctgaggaggaggagggaggatgtgagctg

SEQ ID NO: 8265 - DNA, 126 bp, Artificial Sequence
  source: /note="Description of Artificial Sequence: Synthetic Construct"
aagcgcggcaggaagaagctgctgtacatcttcaagcagccctttatgcgccctgtgcagacaacccaggaggaggacggctgcagctgtaggttccctgaggaggaggagggaggatgtgagctg

SEQ ID NO: 8266 - DNA, 126 bp, Artificial Sequence
  source: /note="Description of Artificial Sequence: Synthetic Construct"
aagcgcggcaggaagaagctgctgtacatcttcaagcagccttttatgcgcccagtgcagacaacccaggaggaggacggctgcagctgtaggttccctgaggaggaggagggaggatgcgagctg

SEQ ID NO: 8267 - DNA, 126 bp, Artificial Sequence
  source: /note="Description of Artificial Sequence: Synthetic Construct"
aaacggggcagaaagaaactcctgtatatattcaaacaaccatttatgagaccagtacaaactactcaagaggaagatggctgtagctgccgatttccagaagaagaagaaggaggatgtgaactg

SEQ ID NO: 8268 - DNA, 27 bp, Artificial Sequence
  source: /note="Description of Artificial Sequence: Synthetic Tag"
tatccttacgatgtgcccgactatgct

SEQ ID NO: 8269 - DNA, 705 bp, Artificial Sequence
  source: /note="Description of Artificial Sequence: Synthetic Payload sequence"
ttgagcaagggcgaggaggacaacatggccatcatcaaggagttcatgcgcttcaaggtgcacatggagggctccgtgaacggccacgagttcgagatcgagggcgagggcgagggccgcccctacgagggcacccagaccgccaagctgaaggtgaccaagggcggccccctgcccttcgcctgggacatcctgtcccctcagttcatgtacggctccaaggcctacgtgaagcaccccgccgacatccccgactacttgaagctgtccttccccgagggcttcaagtgggagcgcgtgatgaacttcgaggacggcggcgtggtgaccgtgacccaggactcctccctgcaggacggcgagttcatctacaaggtgaagctgcgcggcaccaacttcccctccgacggccccgtaatgcagaagaagaccatgggctgggaggcctcctccgagcggatgtaccccgaggacggcgccctgaagggcgagatcaagcagaggctgaagctgaaggacggcggccactacgacgccgaggtcaagaccacctacaaggccaagaagcccgtgcagctgcccggcgcctacaacgtcaacatcaagctggacatcacctcccacaacgaggactacaccatcgtggaacagtacgagcgcgccgagggccgccactccaccggcggcatggacgagctgtacaag

SEQ ID NO: 8270 - DNA, 60 bp, Artificial Sequence
  source: /note="Description of Artificial Sequence: Synthetic Cleavage site"
ggagctactaacttcagcctgctgaagcaggctggagacgtggaggagaaccctggacct

SEQ ID NO: 8271 - protein, 486 aa, Artificial Sequence; identical to SEQ ID NO: 7333
  source: /note="Description of Artificial Sequence: Synthetic polypeptide"

SEQ ID NO: 8272 - protein, 815 aa, Artificial Sequence
  source: /note="Description of Artificial Sequence: Synthetic polypeptide"
MALPVTALLLPLALLLHAARPDIQMTQTTSSLSASLGDRVTISCRASQDISKYLNWYQQKPDGTVKLLIYHTSRLHSGVPSRFSGSGSGTDYSLTISNLEQEDIATYFCQQGNTLPYTFGGGTKLEITGGGGSGGGGSGGGGSEVKLQESGPGLVAPSQSLSVTCTVSGVSLPDYGVSWIRQPPRKGLEWLGVIWGSETTYYNSALKSRLTIIKDNSKSQVFLKMNSLQTDDTAIYYCAKHYYYGGSYAMDYWGQGTSVTVSSTTTPAPRPPTPAPTIASQPLSLRPEACRPAAGGAVHTRGLDFACDIYIWAPLAGTCGVLLLSLVITLYCKRGRKKLLYIFKQPFMRPVQTTQEEDGCSCRFPEEEEGGCELRVKFSRSADAPAYKQGQNQLYNELNLGRREEYDVLDKRRGRDPEMGGKPRRKNPQEGLYNELQKDKMAEAYSEIGMKGERRRGKGHDGLYQGLSTATKDTYDALHMQALPPRGSGEETRELQSLAAAVVPSAQTLKITDFSFSDFELSDLETALCTIRMFTDLNLVQNFQMKHEVLCRWILSVKKNYRKNVAYHNWRHAFNTAQCMFAALKAGKIQNKLTDLEILALLIAALSHDLDHRGVNNSYIQRSEHPLAQLYCHSIMEHHHFDQCLMILNSPGNQILSGLSIEEYKTTLKIIKQAILATDLALYIKRLGEFFELIRKNQFNLEDPHQKELFLAMLMTACNLSAITKPWPIQQRIAELVATEFFDQGDRERKELNIEPTDLMNREKKNKIPSMQVGFIDAICLQLYEALTHVSEDCFPLLDGCRKNRQKWQALAEQQ

SEQ ID NO: 8273 - protein, 815 aa, Artificial Sequence
  source: /note="Description of Artificial Sequence: Synthetic polypeptide"
MALPVTALLLPLALLLHAARPDIQMTQTTSSLSASLGDRVTISCRASQDISKYLNWYQQKPDGTVKLLIYHTSRLHSGVPSRFSGSGSGTDYSLTISNLEQEDIATYFCQQGNTLPYTFGGGTKLEITGGGGSGGGGSGGGGSEVKLQESGPGLVAPSQSLSVTCTVSGVSLPDYGVSWIRQPPRKGLEWLGVIWGSETTYYNSALKSRLTIIKDNSKSQVFLKMNSLQTDDTAIYYCAKHYYYGGSYAMDYWGQGTSVTVSSTTTPAPRPPTPAPTIASQPLSLRPEACRPAAGGAVHTRGLDFACDIYIWAPLAGTCGVLLLSLVITLYCKRGRKKLLYIFKQPFMRPVQTTQEEDGCSCRFPEEEEGGCELRVKFSRSADAPAYKQGQNQLYNELNLGRREEYDVLDKRRGRDPEMGGKPRRKNPQEGLYNELQKDKMAEAYSEIGMKGERRRGKGHDGLYQGLSTATKDTYDALHMQALPPRGSGEETRELQSLAAAVVPSAQTLKITDFSFSDFELSDLETALCTIRMFTDLNLVQNFQMKHEVLCRWILSVKKNYRKNVAYHNWRHAFNTAQCMFAALKAGKIQNKLTDLEILALLIAALSHDLDHRGVNNSYIQRSEHPLAQLYCHSIMEHHHFDQCLMILNSPGNQILSGLSIEEYKTTLKIIKQAILATDLALYIKRLGEFAELIRKNQFNLEDPHQKELFLAMLMTACDLSAITKPWPIQQRIAELVATEFFDQGDRERKELNIEPTDLMNREKKNKIPSMQVGFIDAICLQLYEALTHVSEDCFPLLDGCRKNRQKWQALAEQQ

SEQ ID NO: 8274 - protein, 815 aa, Artificial Sequence
  source: /note="Description of Artificial Sequence: Synthetic polypeptide"
MALPVTALLLPLALLLHAARPDIQMTQTTSSLSASLGDRVTISCRASQDISKYLNWYQQKPDGTVKLLIYHTSRLHSGVPSRFSGSGSGTDYSLTISNLEQEDIATYFCQQGNTLPYTFGGGTKLEITGGGGSGGGGSGGGGSEVKLQESGPGLVAPSQSLSVTCTVSGVSLPDYGVSWIRQPPRKGLEWLGVIWGSETTYYNSALKSRLTIIKDNSKSQVFLKMNSLQTDDTAIYYCAKHYYYGGSYAMDYWGQGTSVTVSSTTTPAPRPPTPAPTIASQPLSLRPEACRPAAGGAVHTRGLDFACDIYIWAPLAGTCGVLLLSLVITLYCKRGRKKLLYIFKQPFMRPVQTTQEEDGCSCRFPEEEEGGCELRVKFSRSADAPAYKQGQNQLYNELNLGRREEYDVLDKRRGRDPEMGGKPRRKNPQEGLYNELQKDKMAEAYSEIGMKGERRRGKGHDGLYQGLSTATKDTYDALHMQALPPRGSGEETRELQSLAAAVVPSAQTLKITDFSFSDFELSDLETALCTIRMFTDLNLVQNFQMKHEVLCRWILSVKKNYRKNVAYHNWRHAFNTAQCMFAALKAGKIQNKLTDLEILALLIAALSHDLDHRGVNNSYIQRSEHPLAQLYCHSIMEHHHFDQCLMILNSPGNQILSGLSIEEYKTTLKIIKQAILATDLALYIKRRGEFFELIRKNQFNLEDPHQKELFLAMLMTACDLSAITKPWPIQQRIAELVATEFFDQGDRERKELNIEPTDLMNREKKNKIPSMQVGFIDAICLQLYEALTHVSEDCFPLLDGCRKNRQKWQALAEQQ

SEQ ID NO: 8275 - protein, 823 aa, Artificial Sequence
  source: /note="Description of Artificial Sequence: Synthetic polypeptide"
MALPVTALLLPLALLLHAARPYPYDVPDYADIQMTQTTSSLSASLGDRVTISCRASQDISKYLNWYQQKPDGTVKLLIYHTSRLHSGVPSRFSGSGSGTDYSLTISNLEQEDIATYFCQQGNTLPYTFGGGTKLEITGGGGSGGGGSGGGGSEVKLQESGPGLVAPSQSLSVTCTVSGVSLPDYGVSWIRQPPRKGLEWLGVIWGSETTYYNSALKSRLTIIKDNSKSQVFLKMNSLQTDDTAIYYCAKHYYYGGSYAMDYWGQGTSVTVSSTTTPAPRPPTPAPTIASQPLSLRPEACRPAAGGAVHTRGLDFACDIYIWAPLAGTCGVLLLSLVITLYCKRGRKKLLYIFKQPFMRPVQTTQEEDGCSCRFPEEEEGGCELRVKFSRSADAPAYKQGQNQLYNELNLGRREEYDVLDKRRGRDPEMGGKPRRKNPQEGLYNELQKDKMAEAYSEIGMKGERRRGKGHDGLYQGLSTATKDTYDALHMQALPPRSGEETRELQSLAAAVVPSAQTLKITDFSFSDFELSDLETALCTIRMFTDLNLVQNFQMKHEVLCRWILSVKKNYRKNVAYHNWRHAFNTAQCMFAALKAGKIQNKLTDLEILALLIAALSHDLDHRGVNNSYIQRSEHPLAQLYCHSIMEHHHFDQCLMILNSPGNQILSGLSIEEYKTTLKIIKQAILATDLALYIKRRGEFFELIRKNQFNLEDPHQKELFLAMLMTACDLSAITKPWPIQQRIAELVATEFFDQGDRERKELNIEPTDLMNREKKNKIPSMQVGFIDAICLQLYEALTHVSEDCFPLLDGCRKNRQKWQALAEQQ

SEQ ID NO: 8276 - protein, 823 aa, Artificial Sequence
  source: /note="Description of Artificial Sequence: Synthetic polypeptide"
MALPVTALLLPLALLLHAARPYPYDVPDYADIQMTQTTSSLSASLGDRVTISCRASQDISKYLNWYQQKPDGTVKLLIYHTSRLHSGVPSRFSGSGSGTDYSLTISNLEQEDIATYFCQQGNTLPYTFGGGTKLEITGGGGSGGGGSGGGGSEVKLQESGPGLVAPSQSLSVTCTVSGVSLPDYGVSWIRQPPRKGLEWLGVIWGSETTYYNSALKSRLTIIKDNSKSQVFLKMNSLQTDDTAIYYCAKHYYYGGSYAMDYWGQGTSVTVSSTTTPAPRPPTPAPTIASQPLSLRPEACRPAAGGAVHTRGLDFACDIYIWAPLAGTCGVLLLSLVITLYCKRGRKKLLYIFKQPFMRPVQTTQEEDGCSCRFPEEEEGGCELRVKFSRSADAPAYKQGQNQLYNELNLGRREEYDVLDKRRGRDPEMGGKPRRKNPQEGLYNELQKDKMAEAYSEIGMKGERRRGKGHDGLYQGLSTATKDTYDALHMQALPPRSGEETRELQSLAAAVVPSAQTLKITDFSFSDFELSDLETALCTIRMFTDLNLVQNFQMKHEVLCRWILSVKKNYRKNVAYHNWRHAFNTAQCMFAALKAGKIQNKLTDLEILALLIAALSHDLDHRGVNNSYIQRSEHPLAQLYCHSIMEHHHFDQCLMILNSPGNQILSGLSIEEYKTTLKIIKQAILATDLALYIKRLGEFFELIRKNQFNLEDPHQKELFLAMLMTACDLSAITKPWPIQQRIAELVATEFFDQGDRERKELNIEPTDLMNREKKNKIPSMQVGFIDAICLQLYEALTHVSEDCFPLLDGCRKNRQKWQALAEQQ

SEQ ID NO: 8277 - protein, 1051 aa, Artificial Sequence
  source: /note="Description of Artificial Sequence: Synthetic polypeptide"
MALPVTALLLPLALLLHAARPDIQMTQTTSSLSASLGDRVTISCRASQDISKYLNWYQQKPDGTVKLLIYHTSRLHSGVPSRFSGSGSGTDYSLTISNLEQEDIATYFCQQGNTLPYTFGGGTKLEITGGGGSGGGGSGGGGSEVKLQESGPGLVAPSQSLSVTCTVSGVSLPDYGVSWIRQPPRKGLEWLGVIWGSETTYYNSALKSRLTIIKDNSKSQVFLKMNSLQTDDTAIYYCAKHYYYGGSYAMDYWGQGTSVTVSSTTTPAPRPPTPAPTIASQPLSLRPEACRPAAGGAVHTRGLDFACDIYIWAPLAGTCGVLLLSLVITLYCKRGRKKLLYIFKQPFMRPVQTTQEEDGCSCRFPEEEEGGCELRVKFSRSADAPAYKQGQNQLYNELNLGRREEYDVLDKRRGRDPEMGGKPRRKNPQEGLYNELQKDKMAEAYSEIGMKGERRRGKGHDGLYQGLSTATKDTYDALHMQALPPRGSEETRELQSLAAAVVPSAQTLKITDFSFSDFELSDLETALCTIRMFTDLNLVQNFQMKHEVLCRWILSVKKNYRKNVAYHNWRHAFNTAQCMFAALKAGKIQNKLTDLEILALLIAALSHDLDHRGVNNSYIQRSEHPLAQLYCHSIMEHHHFDQCLMILNSPGNQILSGLSIEEYKTTLKIIKQAILATDLALYIKRLGEFAELIRKNQFNLEDPHQKELFLAMLMTACDLSAITKPWPIQQRIAELVATEFFDQGDRERKELNIEPTDLMNREKKNKIPSMQVGFIDAICLQLYEALTHVSEDCFPLLDGCRKNRQKWQALAEQQGSLSKGEEDNMAIIKEFMRFKVHMEGSVNGHEFEIEGEGEGRPYEGTQTAKLKVTKGGPLPFAWDILSPQFMYGSKAYVKHPADIPDYLKLSFPEGFKWERVMNFEDGGVVTVTQDSSLQDGEFIYKVKLRGTNFPSDGPVMQKKTMGWEASSERMYPEDGALKGEIKQRLKLKDGGHYDAEVKTTYKAKKPVQLPGAYNVNIKLDITSHNEDYTIVEQYERAEGRHSTGGMDELYK

SEQ ID NO: 8278 - protein, 1072 aa, Artificial Sequence
  source: /note="Description of Artificial Sequence: Synthetic polypeptide"
MALPVTALLLPLALLLHAARPDIQMTQTTSSLSASLGDRVTISCRASQDISKYLNWYQQKPDGTVKLLIYHTSRLHSGVPSRFSGSGSGTDYSLTISNLEQEDIATYFCQQGNTLPYTFGGGTKLEITGGGGSGGGGSGGGGSEVKLQESGPGLVAPSQSLSVTCTVSGVSLPDYGVSWIRQPPRKGLEWLGVIWGSETTYYNSALKSRLTIIKDNSKSQVFLKMNSLQTDDTAIYYCAKHYYYGGSYAMDYWGQGTSVTVSSTTTPAPRPPTPAPTIASQPLSLRPEACRPAAGGAVHTRGLDFACDIYIWAPLAGTCGVLLLSLVITLYCKRGRKKLLYIFKQPFMRPVQTTQEEDGCSCRFPEEEEGGCELRVKFSRSADAPAYKQGQNQLYNELNLGRREEYDVLDKRRGRDPEMGGKPRRKNPQEGLYNELQKDKMAEAYSEIGMKGERRRGKGHDGLYQGLSTATKDTYDALHMQALPPRGSEETRELQSLAAAVVPSAQTLKITDFSFSDFELSDLETALCTIRMFTDLNLVQNFQMKHEVLCRWILSVKKNYRKNVAYHNWRHAFNTAQCMFAALKAGKIQNKLTDLEILALLIAALSHDLDHRGVNNSYIQRSEHPLAQLYCHSIMEHHHFDQCLMILNSPGNQILSGLSIEEYKTTLKIIKQAILATDLALYIKRLGEFAELIRKNQFNLEDPHQKELFLAMLMTACDLSAITKPWPIQQRIAELVATEFFDQGDRERKELNIEPTDLMNREKKNKIPSMQVGFIDAICLQLYEALTHVSEDCFPLLDGCRKNRQKWQALAEQQGSGGATNFSLLKQAGDVEENPGPLSKGEEDNMAIIKEFMRFKVHMEGSVNGHEFEIEGEGEGRPYEGTQTAKLKVTKGGPLPFAWDILSPQFMYGSKAYVKHPADIPDYLKLSFPEGFKWERVMNFEDGGVVTVTQDSSLQDGEFIYKVKLRGTNFPSDGPVMQKKTMGWEASSERMYPEDGALKGEIKQRLKLKDGGHYDAEVKTTYKAKKPVQLPGAYNVNIKLDITSHNEDYTIVEQYERAEGRHSTGGMDELYK

SEQ ID NO: 8279 - protein, 1082 aa, Artificial Sequence
  source: /note="Description of Artificial Sequence: Synthetic polypeptide"
MALPVTALLLPLALLLHAARPYPYDVPDYADIQMTQTTSSLSASLGDRVTISCRASQDISKYLNWYQQKPDGTVKLLIYHTSRLHSGVPSRFSGSGSGTDYSLTISNLEQEDIATYFCQQGNTLPYTFGGGTKLEITGGGGSGGGGSGGGGSEVKLQESGPGLVAPSQSLSVTCTVSGVSLPDYGVSWIRQPPRKGLEWLGVIWGSETTYYNSALKSRLTIIKDNSKSQVFLKMNSLQTDDTAIYYCAKHYYYGGSYAMDYWGQGTSVTVSSTTTPAPRPPTPAPTIASQPLSLRPEACRPAAGGAVHTRGLDFACDIYIWAPLAGTCGVLLLSLVITLYCKRGRKKLLYIFKQPFMRPVQTTQEEDGCSCRFPEEEEGGCELRVKFSRSADAPAYKQGQNQLYNELNLGRREEYDVLDKRRGRDPEMGGKPRRKNPQEGLYNELQKDKMAEAYSEIGMKGERRRGKGHDGLYQGLSTATKDTYDALHMQALPPRGSEETRELQSLAAAVVPSAQTLKITDFSFSDFELSDLETALCTIRMFTDLNLVQNFQMKHEVLCRWILSVKKNYRKNVAYHNWRHAFNTAQCMFAALKAGKIQNKLTDLEILALLIAALSHDLDHRGVNNSYIQRSEHPLAQLYCHSIMEHHHFDQCLMILNSPGNQILSGLSIEEYKTTLKIIKQAILATDLALYIKRRGEFFELIRKNQFNLEDPHQKELFLAMLMTACDLSAITKPWPIQQRIAELVATEFFDQGDRERKELNIEPTDLMNREKKNKIPSMQVGFIDAICLQLYEALTHVSEDCFPLLDGCRKNRQKWQALAEQQGSLDGATNFSLLKQAGDVEENPGPLSKGEEDNMAIIKEFMRFKVHMEGSVNGHEFEIEGEGEGRPYEGTQTAKLKVTKGGPLPFAWDILSPQFMYGSKAYVKHPADIPDYLKLSFPEGFKWERVMNFEDGGVVTVTQDSSLQDGEFIYKVKLRGTNFPSDGPVMQKKTMGWEASSERMYPEDGALKGEIKQRLKLKDGGHYDAEVKTTYKAKKPVQLPGAYNVNIKLDITSHNEDYTIVEQYERAEGRHSTGGMDELYK

SEQ ID NO: 8280 - protein, 1082 aa, Artificial Sequence
  source: /note="Description of Artificial Sequence: Synthetic polypeptide"
MALPVTALLLPLALLLHAARPYPYDVPDYADIQMTQTTSSLSASLGDRVTISCRASQDISKYLNWYQQKPDGTVKLLIYHTSRLHSGVPSRFSGSGSGTDYSLTISNLEQEDIATYFCQQGNTLPYTFGGGTKLEITGGGGSGGGGSGGGGSEVKLQESGPGLVAPSQSLSVTCTVSGVSLPDYGVSWIRQPPRKGLEWLGVIWGSETTYYNSALKSRLTIIKDNSKSQVFLKMNSLQTDDTAIYYCAKHYYYGGSYAMDYWGQGTSVTVSSTTTPAPRPPTPAPTIASQPLSLRPEACRPAAGGAVHTRGLDFACDIYIWAPLAGTCGVLLLSLVITLYCKRGRKKLLYIFKQPFMRPVQTTQEEDGCSCRFPEEEEGGCELRVKFSRSADAPAYKQGQNQLYNELNLGRREEYDVLDKRRGRDPEMGGKPRRKNPQEGLYNELQKDKMAEAYSEIGMKGERRRGKGHDGLYQGLSTATKDTYDALHMQALPPRGSEETRELQSLAAAVVPSAQTLKITDFSFSDFELSDLETALCTIRMFTDLNLVQNFQMKHEVLCRWILSVKKNYRKNVAYHNWRHAFNTAQCMFAALKAGKIQNKLTDLEILALLIAALSHDLDHRGVNNSYIQRSEHPLAQLYCHSIMEHHHFDQCLMILNSPGNQILSGLSIEEYKTTLKIIKQAILATDLALYIKRLGEFFELIRKNQFNLEDPHQKELFLAMLMTACDLSAITKPWPIQQRIAELVATEFFDQGDRERKELNIEPTDLMNREKKNKIPSMQVGFIDAICLQLYEALTHVSEDCFPLLDGCRKNRQKWQALAEQQGSLDGATNFSLLKQAGDVEENPGPLSKGEEDNMAIIKEFMRFKVHMEGSVNGHEFEIEGEGEGRPYEGTQTAKLKVTKGGPLPFAWDILSPQFMYGSKAYVKHPADIPDYLKLSFPEGFKWERVMNFEDGGVVTVTQDSSLQDGEFIYKVKLRGTNFPSDGPVMQKKTMGWEASSERMYPEDGALKGEIKQRLKLKDGGHYDAEVKTTYKAKKPVQLPGAYNVNIKLDITSHNEDYTIVEQYERAEGRHSTGGMDELYK

SEQ ID NO: 8281 - protein, 814 aa, Artificial Sequence
  source: /note="Description of Artificial Sequence: Synthetic polypeptide"
MALPVTALLLPLALLLHAARPDIQMTQTTSSLSASLGDRVTISCRASQDISKYLNWYQQKPDGTVKLLIYHTSRLHSGVPSRFSGSGSGTDYSLTISNLEQEDIATYFCQQGNTLPYTFGGGTKLEITGGGGSGGGGSGGGGSEVKLQESGPGLVAPSQSLSVTCTVSGVSLPDYGVSWIRQPPRKGLEWLGVIWGSETTYYNSALKSRLTIIKDNSKSQVFLKMNSLQTDDTAIYYCAKHYYYGGSYAMDYWGQGTSVTVSSTTTPAPRPPTPAPTIASQPLSLRPEACRPAAGGAVHTRGLDFACDIYIWAPLAGTCGVLLLSLVITLYCKRGRKKLLYIFKQPFMRPVQTTQEEDGCSCRFPEEEEGGCELRVKFSRSADAPAYKQGQNQLYNELNLGRREEYDVLDKRRGRDPEMGGKPRRKNPQEGLYNELQKDKMAEAYSEIGMKGERRRGKGHDGLYQGLSTATKDTYDALHMQALPPRGSEETRELQSLAAAVVPSAQTLKITDFSFSDFELSDLETALCTIRMFTDLNLVQNFQMKHEVLCRWILSVKKNYRKNVAYHNWRHAFNTAQCMFAALKAGKIQNKLTDLEILALLIAALSHDLDHRGVNNSYIQRSEHPLAQLYCHSIMEHHHFDQCLMILNSPGNQILSGLSIEEYKTTLKIIKQAILATDLALYIKRLGEFFELIRKNQFNLEDPHQKELFLAMLMTACDLSAITKPWPIQQRIAELVATEFFDQGDRERKELNIEPTDLMNREKKNKIPSMQVGFIDAICLQLYEALTHVSEDCFPLLDGCRKNRQKWQALAEQQ

SEQ ID NO: 8282 - protein, 814 aa, Artificial Sequence
  source: /note="Description of Artificial Sequence: Synthetic polypeptide"
MALPVTALLLPLALLLHAARPDIQMTQTTSSLSASLGDRVTISCRASQDISKYLNWYQQKPDGTVKLLIYHTSRLHSGVPSRFSGSGSGTDYSLTISNLEQEDIATYFCQQGNTLPYTFGGGTKLEITGGGGSGGGGSGGGGSEVKLQESGPGLVAPSQSLSVTCTVSGVSLPDYGVSWIRQPPRKGLEWLGVIWGSETTYYNSALKSRLTIIKDNSKSQVFLKMNSLQTDDTAIYYCAKHYYYGGSYAMDYWGQGTSVTVSSTTTPAPRPPTPAPTIASQPLSLRPEACRPAAGGAVHTRGLDFACDIYIWAPLAGTCGVLLLSLVITLYCKRGRKKLLYIFKQPFMRPVQTTQEEDGCSCRFPEEEEGGCELRVKFSRSADAPAYKQGQNQLYNELNLGRREEYDVLDKRRGRDPEMGGKPRRKNPQEGLYNELQKDKMAEAYSEIGMKGERRRGKGHDGLYQGLSTATKDTYDALHMQALPPRGSEETRELQSLAAAVVPSAQTLKITDFSFSDFELSDLETALCTIRMFTDLNLVQNFQMKHEVLCRWILSVKKNYRKNVAYHNWRHAFNTAQCMFAALKAGKIQNKLTDLEILALLIAALSADLDHRGVNNSYIQRSEHPLAQLYCHSIMEHHHFDQCLMILNSPGNQILSGLSIEEYKTTLKIIKQAILATDLALYIKRRGEFFELIRKNQFNLEDPHQKELFLAMLMTACDLSAITKPWPIQQRIAELVATEFFDQGDRERKELNIEPTDLMNREKKNKIPSMQVGFIDAICLQLYEALTHVSEDCFPLLDGCRKNRQKWQALAEQQ

SEQ ID NO: 8283 - protein, 814 aa, Artificial Sequence
  source: /note="Description of Artificial Sequence: Synthetic polypeptide"
MALPVTALLLPLALLLHAARPDIQMTQTTSSLSASLGDRVTISCRASQDISKYLNWYQQKPDGTVKLLIYHTSRLHSGVPSRFSGSGSGTDYSLTISNLEQEDIATYFCQQGNTLPYTFGGGTKLEITGGGGSGGGGSGGGGSEVKLQESGPGLVAPSQSLSVTCTVSGVSLPDYGVSWIRQPPRKGLEWLGVIWGSETTYYNSALKSRLTIIKDNSKSQVFLKMNSLQTDDTAIYYCAKHYYYGGSYAMDYWGQGTSVTVSSTTTPAPRPPTPAPTIASQPLSLRPEACRPAAGGAVHTRGLDFACDIYIWAPLAGTCGVLLLSLVITLYCKRGRKKLLYIFKQPFMRPVQTTQEEDGCSCRFPEEEEGGCELRVKFSRSADAPAYKQGQNQLYNELNLGRREEYDVLDKRRGRDPEMGGKPRRKNPQEGLYNELQKDKMAEAYSEIGMKGERRRGKGHDGLYQGLSTATKDTYDALHMQALPPRGSEETRELQSLAAAVVPSAQTLKITDFSFSDFELSDLETALCTIRMFTDLNLVQNFQMKHEVLCRWILSVKKNYRKNVAYHNWRHAFNTAQCMFAALKAGKIQNKLTDLEILALLIAALSADLDHRGVNNSYIQRSEHPLAQLYCHSIMEHHHFDQCLMILNSPGNQILSGLSIEEYKTTLKIIKQAILATDLALYIKRLGEFFELIRKNQFNLEDPHQKELFLAMLMTACDLSAITKPWPIQQRIAELVATEFFDQGDRERKELNIEPTDLMNREKKNKIPSMQVGFIDAICLQLYEALTHVSEDCFPLLDGCRKNRQKWQALAEQQ

SEQ ID NO: 8284 - protein, 814 aa, Artificial Sequence
  source: /note="Description of Artificial Sequence: Synthetic polypeptide"
MALPVTALLLPLALLLHAARPDIQMTQTTSSLSASLGDRVTISCRASQDISKYLNWYQQKPDGTVKLLIYHTSRLHSGVPSRFSGSGSGTDYSLTISNLEQEDIATYFCQQGNTLPYTFGGGTKLEITGGGGSGGGGSGGGGSEVKLQESGPGLVAPSQSLSVTCTVSGVSLPDYGVSWIRQPPRKGLEWLGVIWGSETTYYNSALKSRLTIIKDNSKSQVFLKMNSLQTDDTAIYYCAKHYYYGGSYAMDYWGQGTSVTVSSTTTPAPRPPTPAPTIASQPLSLRPEACRPAAGGAVHTRGLDFACDIYIWAPLAGTCGVLLLSLVITLYCKRGRKKLLYIFKQPFMRPVQTTQEEDGCSCRFPEEEEGGCELRVKFSRSADAPAYKQGQNQLYNELNLGRREEYDVLDKRRGRDPEMGGKPRRKNPQEGLYNELQKDKMAEAYSEIGMKGERRRGKGHDGLYQGLSTATKDTYDALHMQALPPRGSEETRELQSLAAAVVPSAQTLKITDFSFSDFELSDLETALCTIRMFTDLNLVQNFQMKHEVLCRWILSVKKNYRKNVAYHNWRHAFNTAQCMFAALKAGKIQNKLTDLEILALLIAALSHDLDHRGVNNSYIQRSEHPLAQLYCHSIMEHHHFDQCLMILNSPGNQILSGLSIEEYKTTLKIIKQAILATDLALYIKRLGEFFELIRKNQFNLEDPHQKELFLAMLMTACALSAITKPWPIQQRIAELVATEFFDQGDRERKELNIEPTDLMNREKKNKIPSMQVGFIDAICLQLYEALTHVSEDCFPLLDGCRKNRQKWQALAEQQ

SEQ ID NO: 8285 - DNA, 1461 bp, Artificial Sequence
  source: /note="Description of Artificial Sequence: Synthetic polynucleotide"
atggccttaccagtgaccgccttgctcctgccgctggccttgctgctccacgccgccaggccggacatccagatgacacagactacatcctccctgtctgcctctctgggagacagagtcaccatcagttgcagggcaagtcaggacattagtaaatatttaaattggtatcagcagaaaccagatggaactgttaaactcctgatctaccatacatcaagattacactcaggagtcccatcaaggttcagtggcagtgggtctggaacagattattctctcaccattagcaacctggagcaagaagatattgccacttacttttgccaacagggtaatacgcttccgtacacgttcggaggggggaccaagctggagatcacaggtggcggtggctcgggcggtggtgggtcgggtggcggcggatctgaggtgaaactgcaggagtcaggacctggcctggtggcgccctcacagagcctgtccgtcacatgcactgtctcaggggtctcattacccgactatggtgtaagctggattcgccagcctccacgaaagggtctggagtggctgggagtaatatggggtagtgaaaccacatactataattcagctctcaaatccagactgaccatcatcaaggacaactccaagagccaagttttcttaaaaatgaacagtctgcaaactgatgacacagccatttactactgtgccaaacattattactacggtggtagctatgctatggactactggggccaaggaacctcagtcaccgtctcctcaaccacgacgccagcgccgcgaccaccaacaccggcgcccaccatcgcgtcgcagcccctgtccctgcgcccagaggcgtgccggccagcggcggggggcgcagtgcacacgagggggctggacttcgcctgtgatatctacatctgggcgcccttggccgggacttgtggggtccttctcctgtcactggttatcaccctttactgcaaacggggcagaaagaaactcctgtatatattcaaacaaccatttatgagaccagtacaaactactcaagaggaagatggctgtagctgccgatttccagaagaagaagaaggaggatgtgaactgagagtgaagttcagcaggagcgcagacgcccccgcgtacaagcagggccagaaccagctctataacgagctcaatctaggacgaagagaggagtacgatgttttggacaagagacgtggccgggaccctgagatggggggaaagccgagaaggaagaaccctcaggaaggcctgtacaatgaactgcagaaagataagatggcggaggcctacagtgagattgggatgaaaggcgagcgccggaggggcaaggggcacgatggcctttaccagggtctcagtacagccaccaaggacacctacgacgcccttcacatgcaggccctgccccctcgctaa

SEQ ID NO: 8286 - DNA, 2448 bp, Artificial Sequence
  source: /note="Description of Artificial Sequence: Synthetic polynucleotide"
atggcactgcctgtgaccgccctgctgctgccactggccctgctgctgcacgcagccaggcccgacatccagatgacacagaccacaagctccctgtccgcctctctgggcgacagagtgaccatcagctgccgggcctcccaggatatctctaagtatctgaactggtaccagcagaagcccgatggcacagtgaagctgctgatctatcacaccagccgcctgcactccggagtgccttctaggttcagcggctccggctctggcacagactacagcctgaccatctccaacctggagcaggaggatatcgccacctatttctgccagcagggcaatacactgccttacacctttggcggcggcacaaagctggagatcaccggaggaggaggcagcggaggaggaggctccggcggcggcggctctgaggtgaagctgcaggagtccggaccaggcctggtggcacctagccagtccctgtctgtgacatgtaccgtgtccggcgtgtctctgccagactacggcgtgtcttggatcaggcagccacctaggaagggcctggagtggctgggcgtgatctggggcagcgagacaacatactataattctgccctgaagagcagactgacaatcatcaaggacaacagcaagtcccaggtgttcctgaagatgaatagcctgcagacagacgataccgccatctactattgcgccaagcactactattacggcggcagctatgccatggattactggggccagggcacatccgtgaccgtgtctagcaccacaaccccagcacctcgcccaccaacaccagcaccaaccatcgcatcccagccactgtctctgaggcccgaggcatgtaggcctgcagcaggaggcgccgtgcacaccaggggcctggactttgcctgcgatatctatatctgggcaccactggcaggaacatgtggcgtgctgctgctgtccctggtcatcaccctgtattgcaagagaggccggaagaagctgctgtacatcttcaagcagcccttcatgaggcccgtgcagacaacccaggaggaggacggctgcagctgtcggttcccagaggaggaggagggaggatgtgagctgagggtgaagttttctaggagcgccgatgcaccagcatataagcagggacagaaccagctgtacaacgagctgaatctgggcaggagagaggagtacgacgtgctggataagaggaggggaagggaccccgagatgggaggcaagccaaggagaaagaacccccaggagggcctgtataatgagctgcagaaggacaagatggccgaggcctactccgagatcggcatgaagggagagcggcgcaggggcaagggacacgatggcctgtatcagggcctgtctacagccaccaaggacacctacgatgcactgcacatgcaggccctgcctccaaggggatccggagaagaaacaagagagctacagtcgttagcggctgctgtggtgccatctgcccagacccttaaaattactgactttagcttcagtgactttgagctgtctgatctggaaacagcactgtgtacaattcggatgtttactgacctcaaccttgtgcagaacttccagatgaaacatgaggttctttgcagatggattttaagtgttaagaagaattatcggaagaatgttgcctatcataattggagacatgcctttaatacagctcagtgcatgtttgctgctctaaaagcaggcaaaattcagaacaagctgactgacctggagatacttgcattgctgattgctgcactaagccacgatttggatcaccgtggtgtgaataactcttacatacagcgaagtgaacatccacttgcccagctttactgccattcaatcatggaacaccatcattttgaccagtgcctgatgattcttaatagtccaggcaatcagattctcagtggcctctccattgaagaatataagaccacgttgaaaataatcaagcaagctattttagctacagacctagcactgtacattaagaggctaggagaattttttgaacttataagaaaaaatcaattcaatttggaagatcctcatcaaaaggagttgtttttggcaatgctgatgacagcttgtaatctttctgcaattacaaaaccctggcctattcaacaacggatagcagaacttgtagcaactgaattttttgatcaaggagacagagagagaaaagaactcaacatagaacccactgatctaatgaacagggagaagaaaaacaaaatcccaagtatgcaagttgggttcatagatgccatctgcttgcaactgtatgaggccctgacccacgtgtcagaggactgtttccctttgctagatggctgcagaaagaacaggcagaaatggcaggcccttgcagaacagcagtag

SEQ ID NO: 8287 - DNA, 2448 bp, Artificial Sequence
  source: /note="Description of Artificial Sequence: Synthetic polynucleotide"
atggcactgcctgtgaccgccctgctgctgccactggccctgctgctgcacgcagccaggcccgacatccagatgacacagaccacaagctccctgtccgcctctctgggcgacagagtgaccatcagctgccgggcctcccaggatatctctaagtatctgaactggtaccagcagaagcccgatggcacagtgaagctgctgatctatcacaccagccgcctgcactccggagtgccttctaggttcagcggctccggctctggcacagactacagcctgaccatctccaacctggagcaggaggatatcgccacctatttctgccagcagggcaatacactgccttacacctttggcggcggcacaaagctggagatcaccggaggaggaggcagcggaggaggaggctccggcggcggcggctctgaggtgaagctgcaggagtccggaccaggcctggtggcacctagccagtccctgtctgtgacatgtaccgtgtccggcgtgtctctgccagactacggcgtgtcttggatcaggcagccacctaggaagggcctggagtggctgggcgtgatctggggcagcgagacaacatactataattctgccctgaagagcagactgacaatcatcaaggacaacagcaagtcccaggtgttcctgaagatgaatagcctgcagacagacgataccgccatctactattgcgccaagcactactattacggcggcagctatgccatggattactggggccagggcacatccgtgaccgtgtctagcaccacaaccccagcacctcgcccaccaacaccagcaccaaccatcgcatcccagccactgtctctgaggcccgaggcatgtaggcctgcagcaggaggcgccgtgcacaccaggggcctggactttgcctgcgatatctatatctgggcaccactggcaggaacatgtggcgtgctgctgctgtccctggtcatcaccctgtattgcaagagaggccggaagaagctgctgtacatcttcaagcagcccttcatgaggcccgtgcagacaacccaggaggaggacggctgcagctgtcggttcccagaggaggaggagggaggatgtgagctgagggtgaagttttctaggagcgccgatgcaccagcatataagcagggacagaaccagctgtacaacgagctgaatctgggcaggagagaggagtacgacgtgctggataagaggaggggaagggaccccgagatgggaggcaagccaaggagaaagaacccccaggagggcctgtataatgagctgcagaaggacaagatggccgaggcctactccgagatcggcatgaagggagagcggcgcaggggcaagggacacgatggcctgtatcagggcctgtctacagccaccaaggacacctacgatgcactgcacatgcaggccctgcctccaaggggatccggagaagaaacaagagagctacagtcgttagcggctgctgtggtgccatctgcccagacccttaaaattactgactttagcttcagtgactttgagctgtctgatctggaaacagcactgtgtacaattcggatgtttactgacctcaaccttgtgcagaacttccagatgaaacatgaggttctttgcagatggattttaagtgttaagaagaattatcggaagaatgttgcctatcataattggagacatgcctttaatacagctcagtgcatgtttgctgctctaaaagcaggcaaaattcagaacaagctgactgacctggagatacttgcattgctgattgctgcactaagccacgatttggatcaccgtggtgtgaataactcttacatacagcgaagtgaacatccacttgcccagctttactgccattcaatcatggaacaccatcattttgaccagtgcctgatgattcttaatagtccaggcaatcagattctcagtggcctctccattgaagaatataagaccacgttgaaaataatcaagcaagctattttagctacagacctagcactgtacattaagaggctaggagaatttgctgaacttataagaaaaaatcaattcaatttggaagatcctcatcaaaaggagttgtttttggcaatgctgatgacagcttgtgatctttctgcaattacaaaaccctggcctattcaacaacggatagcagaacttgtagcaactgaattttttgatcaaggagacagagagagaaaagaactcaacatagaacccactgatctaatgaacagggagaagaaaaacaaaatcccaagtatgcaagttgggttcatagatgccatctgcttgcaactgtatgaggccctgacccacgtgtcagaggactgtttccctttgctagatggctgcagaaagaacaggcagaaatggcaggcccttgcagaacagcagtag

SEQ ID NO: 8288 - DNA, 2448 bp, Artificial Sequence
  source: /note="Description of Artificial Sequence: Synthetic polynucleotide"
atggcactgcctgtgaccgccctgctgctgccactggccctgctgctgcacgcagccaggcccgacatccagatgacacagaccacaagctccctgtccgcctctctgggcgacagagtgaccatcagctgccgggcctcccaggatatctctaagtatctgaactggtaccagcagaagcccgatggcacagtgaagctgctgatctatcacaccagccgcctgcactccggagtgccttctaggttcagcggctccggctctggcacagactacagcctgaccatctccaacctggagcaggaggatatcgccacctatttctgccagcagggcaatacactgccttacacctttggcggcggcacaaagctggagatcaccggaggaggaggcagcggaggaggaggctccggcggcggcggctctgaggtgaagctgcaggagtccggaccaggcctggtggcacctagccagtccctgtctgtgacatgtaccgtgtccggcgtgtctctgccagactacggcgtgtcttggatcaggcagccacctaggaagggcctggagtggctgggcgtgatctggggcagcgagacaacatactataattctgccctgaagagcagactgacaatcatcaaggacaacagcaagtcccaggtgttcctgaagatgaatagcctgcagacagacgataccgccatctactattgcgccaagcactactattacggcggcagctatgccatggattactggggccagggcacatccgtgaccgtgtctagcaccacaaccccagcacctcgcccaccaacaccagcaccaaccatcgcatcccagccactgtctctgaggcccgaggcatgtaggcctgcagcaggaggcgccgtgcacaccaggggcctggactttgcctgcgatatctatatctgggcaccactggcaggaacatgtggcgtgctgctgctgtccctggtcatcaccctgtattgcaagagaggccggaagaagctgctgtacatcttcaagcagcccttcatgaggcccgtgcagacaacccaggaggaggacggctgcagctgtcggttcccagaggaggaggagggaggatgtgagctgagggtgaagttttctaggagcgccgatgcaccagcatataagcagggacagaaccagctgtacaacgagctgaatctgggcaggagagaggagtacgacgtgctggataagaggaggggaagggaccccgagatgggaggcaagccaaggagaaagaacccccaggagggcctgtataatgagctgcagaaggacaagatggccgaggcctactccgagatcggcatgaagggagagcggcgcaggggcaagggacacgatggcctgtatcagggcctgtctacagccaccaaggacacctacgatgcactgcacatgcaggccctgcctccaaggggatccggagaagaaacaagagagctacagtcgttagcggctgctgtggtgccatctgcccagacccttaaaattactgactttagcttcagtgactttgagctgtctgatctggaaacagcactgtgtacaattcggatgtttactgacctcaaccttgtgcagaacttccagatgaaacatgaggttctttgcagatggattttaagtgttaagaagaattatcggaagaatgttgcctatcataattggagacatgcctttaatacagctcagtgcatgtttgctgctctaaaagcaggcaaaattcagaacaagctgactgacctggagatacttgcattgctgattgctgcactaagccacgatttggatcaccgtggtgtgaataactcttacatacagcgaagtgaacatccacttgcccagctttactgccattcaatcatggaacaccatcattttgaccagtgcctgatgattcttaatagtccaggcaatcagattctcagtggcctctccattgaagaatataagaccacgttgaaaataatcaagcaagctattttagctacagacctagcactgtacattaagaggcgaggagaattttttgaacttataagaaaaaatcaattcaatttggaagatcctcatcaaaaggagttgtttttggcaatgctgatgacagcttgtgatctttctgcaattacaaaaccctggcctattcaacaacggatagcagaacttgtagcaactgaattttttgatcaaggagacagagagagaaaagaactcaacatagaacccactgatctaatgaacagggagaagaaaaacaaaatcccaagtatgcaagttgggttcatagatgccatctgcttgcaactgtatgaggccctgacccacgtgtcagaggactgtttccctttgctagatggctgcagaaagaacaggcagaaatggcaggcccttgcagaacagcagtag

SEQ ID NO: 8289 - DNA, 2472 bp, Artificial Sequence
  source: /note="Description of Artificial Sequence: Synthetic polynucleotide"
atggcactgcctgtgaccgccctgctgctgccactggccctgctgctgcacgcagccaggccctatccttacgatgtgcccgactatgctgacatccagatgacacagaccacaagctccctgtccgcctctctgggcgacagagtgaccatcagctgccgggcctcccaggatatctctaagtatctgaactggtaccagcagaagcccgatggcacagtgaagctgctgatctatcacaccagccgcctgcactccggagtgccttctaggttcagcggctccggctctggcacagactacagcctgaccatctccaacctggagcaggaggatatcgccacctatttctgccagcagggcaatacactgccttacacctttggcggcggcacaaagctggagatcaccggaggaggaggcagcggaggaggaggctccggcggcggcggctctgaggtgaagctgcaggagtccggaccaggcctggtggcacctagccagtccctgtctgtgacatgtaccgtgtccggcgtgtctctgccagactacggcgtgtcttggatcaggcagccacctaggaagggcctggagtggctgggcgtgatctggggcagcgagacaacatactataattctgccctgaagagcagactgacaatcatcaaggacaacagcaagtcccaggtgttcctgaagatgaatagcctgcagacagacgataccgccatctactattgcgccaagcactactattacggcggcagctatgccatggattactggggccagggcacatccgtgaccgtgtctagcaccacaaccccagcacctcgcccaccaacaccagcaccaaccatcgcatcccagccactgtctctgaggcccgaggcatgtaggcctgcagcaggaggcgccgtgcacaccaggggcctggactttgcctgcgatatctatatctgggcaccactggcaggaacatgtggcgtgctgctgctgtccctggtcatcaccctgtattgcaagagaggccggaagaagctgctgtacatcttcaagcagcccttcatgaggcccgtgcagacaacccaggaggaggacggctgcagctgtcggttcccagaggaggaggagggaggatgtgagctgagggtgaagttttctaggagcgccgatgcaccagcatataagcagggacagaaccagctgtacaacgagctgaatctgggcaggagagaggagtacgacgtgctggataagaggaggggaagggaccccgagatgggaggcaagccaaggagaaagaacccccaggagggcctgtataatgagctgcagaaggacaagatggccgaggcctactccgagatcggcatgaagggagagcggcgcaggggcaagggacacgatggcctgtatcagggcctgtctacagccaccaaggacacctacgatgcactgcacatgcaggccctgcctccaaggtcaggtgaagaaacaagagagctacagtcgttagcggctgctgtggtgccatctgcccagacccttaaaattactgactttagcttcagtgactttgagctgtctgatctggaaacagcactgtgtacaattcggatgtttactgacctcaaccttgtgcagaacttccagatgaaacatgaggttctttgcagatggattttaagtgttaagaagaattatcggaagaatgttgcctatcataattggagacatgcctttaatacagctcagtgcatgtttgctgctctaaaagcaggcaaaattcagaacaagctgactgacctggagatacttgcattgctgattgctgcactaagccacgatttggatcaccgtggtgtgaataactcttacatacagcgaagtgaacatccacttgcccagctttactgccattcaatcatggaacaccatcattttgaccagtgcctgatgattcttaatagtccaggcaatcagattctcagtggcctctccattgaagaatataagaccacgttgaaaataatcaagcaagctattttagctacagacctagcactgtacattaagaggcgaggagaattttttgaacttataagaaaaaatcaattcaatttggaagatcctcatcaaaaggagttgtttttggcaatgctgatgacagcttgtgatctttctgcaattacaaaaccctggcctattcaacaacggatagcagaacttgtagcaactgaattttttgatcaaggagacagagagagaaaagaactcaacatagaacccactgatctaatgaacagggagaagaaaaacaaaatcccaagtatgcaagttgggttcatagatgccatctgcttgcaactgtatgaggccctgacccacgtgtcagaggactgtttccctttgctagatggctgcagaaagaacaggcagaaatggcaggcccttgcagaacagcagtag

SEQ ID NO: 8290 - DNA, 2472 bp, Artificial Sequence
  source: /note="Description of Artificial Sequence: Synthetic polynucleotide"
atggcactgcctgtgaccgccctgctgctgccactggccctgctgctgcacgcagccaggccctatccttacgatgtgcccgactatgctgacatccagatgacacagaccacaagctccctgtccgcctctctgggcgacagagtgaccatcagctgccgggcctcccaggatatctctaagtatctgaactggtaccagcagaagcccgatggcacagtgaagctgctgatctatcacaccagccgcctgcactccggagtgccttctaggttcagcggctccggctctggcacagactacagcctgaccatctccaacctggagcaggaggatatcgccacctatttctgccagcagggcaatacactgccttacacctttggcggcggcacaaagctggagatcaccggaggaggaggcagcggaggaggaggctccggcggcggcggctctgaggtgaagctgcaggagtccggaccaggcctggtggcacctagccagtccctgtctgtgacatgtaccgtgtccggcgtgtctctgccagactacggcgtgtcttggatcaggcagccacctaggaagggcctggagtggctgggcgtgatctggggcagcgagacaacatactataattctgccctgaagagcagactgacaatcatcaaggacaacagcaagtcccaggtgttcctgaagatgaatagcctgcagacagacgataccgccatctactattgcgccaagcactactattacggcggcagctatgccatggattactggggccagggcacatccgtgaccgtgtctagcaccacaaccccagcacctcgcccaccaacaccagcaccaaccatcgcatcccagccactgtctctgaggcccgaggcatgtaggcctgcagcaggaggcgccgtgcacaccaggggcctggactttgcctgcgatatctatatctgggcaccactggcaggaacatgtggcgtgctgctgctgtccctggtcatcaccctgtattgcaagagaggccggaagaagctgctgtacatcttcaagcagcccttcatgaggcccgtgcagacaacccaggaggaggacggctgcagctgtcggttcccagaggaggaggagggaggatgtgagctgagggtgaagttttctaggagcgccgatgcaccagcatataagcagggacagaaccagctgtacaacgagctgaatctgggcaggagagaggagtacgacgtgctggataagaggaggggaagggaccccgagatgggaggcaagccaaggagaaagaacccccaggagggcctgtataatgagctgcagaaggacaagatggccgaggcctactccgagatcggcatgaagggagagcggcgcaggggcaagggacacgatggcctgtatcagggcctgtctacagccaccaaggacacctacgatgcactgcacatgcaggccctgcctccaaggtcaggtgaagaaacaagagagctacagtcgttagcggctgctgtggtgccatctgcccagacccttaaaattactgactttagcttcagtgactttgagctgtctgatctggaaacagcactgtgtacaattcggatgtttactgacctcaaccttgtgcagaacttccagatgaaacatgaggttctttgcagatggattttaagtgttaagaagaattatcggaagaatgttgcctatcataattggagacatgcctttaatacagctcagtgcatgtttgctgctctaaaagcaggcaaaattcagaacaagctgactgacctggagatacttgcattgctgattgctgcactaagccacgatttggatcaccgtggtgtgaataactcttacatacagcgaagtgaacatccacttgcccagctttactgccattcaatcatggaacaccatcattttgaccagtgcctgatgattcttaatagtccaggcaatcagattctcagtggcctctccattgaagaatataagaccacgttgaaaataatcaagcaagctattttagctacagacctagcactgtacattaagaggctaggagaattttttgaacttataagaaaaaatcaattcaatttggaagatcctcatcaaaaggagttgtttttggcaatgctgatgacagcttgtgatctttctgcaattacaaaaccctggcctattcaacaacggatagcagaacttgtagcaactgaattttttgatcaaggagacagagagagaaaagaactcaacatagaacccactgatctaatgaacagggagaagaaaaacaaaatcccaagtatgcaagttgggttcatagatgccatctgcttgcaactgtatgaggccctgacccacgtgtcagaggactgtttccctttgctagatggctgcagaaagaacaggcagaaatggcaggcccttgcagaacagcagtag

SEQ ID NO: 8291 - DNA, 3156 bp, Artificial Sequence
  source: /note="Description of Artificial Sequence: Synthetic polynucleotide"
atggccttaccagtgaccgccttgctcctgccgctggccttgctgctccacgccgccaggccggacatccagatgacacagactacatcctccctgtctgcctctctgggagacagagtcaccatcagttgcagggcaagtcaggacattagtaaatatttaaattggtatcagcagaaaccagatggaactgttaaactcctgatctaccatacatcaagattacactcaggagtcccatcaaggttcagtggcagtgggtctggaacagattattctctcaccattagcaacctggagcaagaagatattgccacttacttttgccaacagggtaatacgcttccgtacacgttcggaggggggaccaagctggagatcacaggtggcggtggctcgggcggtggtgggtcgggtggcggcggatctgaggtgaaactgcaggagtcaggacctggcctggtggcgccctcacagagcctgtccgtcacatgcactgtctcaggggtctcattacccgactatggtgtaagctggattcgccagcctccacgaaagggtctggagtggctgggagtaatatggggtagtgaaaccacatactataattcagctctcaaatccagactgaccatcatcaaggacaactccaagagccaagttttcttaaaaatgaacagtctgcaaactgatgacacagccatttactactgtgccaaacattattactacggtggtagctatgctatggactactggggccaaggaacctcagtcaccgtctcctcaaccacgacgccagcgccgcgaccaccaacaccggcgcccaccatcgcgtcgcagcccctgtccctgcgcccagaggcgtgccggccagcggcggggggcgcagtgcacacgagggggctggacttcgcctgtgatatctacatctgggcgcccttggccgggacttgtggggtccttctcctgtcactggttatcaccctttactgcaaacggggcagaaagaaactcctgtatatattcaaacaaccatttatgagaccagtacaaactactcaagaggaagatggctgtagctgccgatttccagaagaagaagaaggaggatgtgaactgagagtgaagttcagcaggagcgcagacgcccccgcgtacaagcagggccagaaccagctctataacgagctcaatctaggacgaagagaggagtacgatgttttggacaagagacgtggccgggaccctgagatggggggaaagccgagaaggaagaaccctcaggaaggcctgtacaatgaactgcagaaagataagatggcggaggcctacagtgagattgggatgaaaggcgagcgccggaggggcaaggggcacgatggcctttaccagggtctcagtacagccaccaaggacacctacgacgcccttcacatgcaggccctgccccctcgcggatccgaagaaacaagagagctacagtcgttagcggctgctgtggtgccatctgcccagacccttaaaattactgactttagcttcagtgactttgagctgtctgatctggaaacagcactgtgtacaattcggatgtttactgacctcaaccttgtgcagaacttccagatgaaacatgaggttctttgcagatggattttaagtgttaagaagaattatcggaagaatgttgcctatcataattggagacatgcctttaatacagctcagtgcatgtttgctgctctaaaagcaggcaaaattcagaacaagctgactgacctggagatacttgcattgctgattgctgcactaagccacgatttggatcaccgtggtgtgaataactcttacatacagcgaagtgaacatccacttgcccagctttactgccattcaatcatggaacaccatcattttgaccagtgcctgatgattcttaatagtccaggcaatcagattctcagtggcctctccattgaagaatataagaccacgttgaaaataatcaagcaagctattttagctacagacctagcactgtacattaagaggctaggagaatttgctgaacttataagaaaaaatcaattcaatttggaagatcctcatcaaaaggagttgtttttggcaatgctgatgacagcttgtgatctttctgcaattacaaaaccctggcctattcaacaacggatagcagaacttgtagcaactgaattttttgatcaaggagacagagagagaaaagaactcaacatagaacccactgatctaatgaacagggagaagaaaaacaaaatcccaagtatgcaagttgggttcatagatgccatctgcttgcaactgtatgaggccctgacccacgtgtcagaggactgtttccctttgctagatggctgcagaaagaacaggcagaaatggcaggcccttgcagaacagcagggatcattgagcaagggcgaggaggacaacatggccatcatcaaggagttcatgcgcttcaaggtgcacatggagggctccgtgaacggccacgagttcgagatcgagggcgagggcgagggccgcccctacgagggcacccagaccgccaagctgaaggtgaccaagggcggccccctgcccttcgcctgggacatcctgtcccctcagttcatgtacggctccaaggcctacgtgaagcaccccgccgacatccccgactacttgaagctgtccttccccgagggcttcaagtgggagcgcgtgatgaacttcgaggacggcggcgtggtgaccgtgacccaggactcctccctgcaggacggcgagttcatctacaaggtgaagctgcgcggcaccaacttcccctccgacggccccgtaatgcagaagaagaccatgggctgggaggcctcctccgagcggatgtaccccgaggacggcgccctgaagggcgagatcaagcagaggctgaagctgaaggacggcggccactacgacgccgaggtcaagaccacctacaaggccaagaagcccgtgcagctgcccggcgcctacaacgtcaacatcaagctggacatcacctcccacaacgaggactacaccatcgtggaacagtacgagcgcgccgagggccgccactccaccggcggcatggacgagctgtacaagtaa

SEQ ID NO: 8292 - DNA, 3219 bp, Artificial Sequence
  source: /note="Description of Artificial Sequence: Synthetic polynucleotide"
atggccttaccagtgaccgccttgctcctgccgctggccttgctgctccacgccgccaggccggacatccagatgacacagactacatcctccctgtctgcctctctgggagacagagtcaccatcagttgcagggcaagtcaggacattagtaaatatttaaattggtatcagcagaaaccagatggaactgttaaactcctgatctaccatacatcaagattacactcaggagtcccatcaaggttcagtggcagtgggtctggaacagattattctctcaccattagcaacctggagcaagaagatattgccacttacttttgccaacagggtaatacgcttccgtacacgttcggaggggggaccaagctggagatcacaggtggcggtggctcgggcggtggtgggtcgggtggcggcggatctgaggtgaaactgcaggagtcaggacctggcctggtggcgccctcacagagcctgtccgtcacatgcactgtctcaggggtctcattacccgactatggtgtaagctggattcgccagcctccacgaaagggtctggagtggctgggagtaatatggggtagtgaaaccacatactataattcagctctcaaatccagactgaccatcatcaaggacaactccaagagccaagttttcttaaaaatgaacagtctgcaaactgatgacacagccatttactactgtgccaaacattattactacggtggtagctatgctatggactactggggccaaggaacctcagtcaccgtctcctcaaccacgacgccagcgccgcgaccaccaacaccggcgcccaccatcgcgtcgcagcccctgtccctgcgcccagaggcgtgccggccagcggcggggggcgcagtgcacacgagggggctggacttcgcctgtgatatctacatctgggcgcccttggccgggacttgtggggtccttctcctgtcactggttatcaccctttactgcaaacggggcagaaagaaactcctgtatatattcaaacaaccatttatgagaccagtacaaactactcaagaggaagatggctgtagctgccgatttccagaagaagaagaaggaggatgtgaactgagagtgaagttcagcaggagcgcagacgcccccgcgtacaagcagggccagaaccagctctataacgagctcaatctaggacgaagagaggagtacgatgttttggacaagagacgtggccgggaccctgagatggggggaaagccgagaaggaagaaccctcaggaaggcctgtacaatgaactgcagaaagataagatggcggaggcctacagtgagattgggatgaaaggcgagcgccggaggggcaaggggcacgatggcctttaccagggtctcagtacagccaccaaggacacctacgacgcccttcacatgcaggccctgccccctcgcggatccgaagaaacaagagagctacagtcgttagcggctgctgtggtgccatctgcccagacccttaaaattactgactttagcttcagtgactttgagctgtctgatctggaaacagcactgtgtacaattcggatgtttactgacctcaaccttgtgcagaacttccagatgaaacatgaggttctttgcagatggattttaagtgttaagaagaattatcggaagaatgttgcctatcataattggagacatgcctttaatacagctcagtgcatgtttgctgctctaaaagcaggcaaaattcagaacaagctgactgacctggagatacttgcattgctgattgctgcactaagccacgatttggatcaccgtggtgtgaataactcttacatacagcgaagtgaacatccacttgcccagctttactgccattcaatcatggaacaccatcattttgaccagtgcctgatgattcttaatagtccaggcaatcagattctcagtggcctctccattgaagaatataagaccacgttgaaaataatcaagcaagctattttagctacagacctagcactgtacattaagaggctaggagaatttgctgaacttataagaaaaaatcaattcaatttggaagatcctcatcaaaaggagttgtttttggcaatgctgatgacagcttgtgatctttctgcaattacaaaaccctggcctattcaacaacggatagcagaacttgtagcaactgaattttttgatcaaggagacagagagagaaaagaactcaacatagaacccactgatctaatgaacagggagaagaaaaacaaaatcccaagtatgcaagttgggttcatagatgccatctgcttgcaactgtatgaggccctgacccacgtgtcagaggactgtttccctttgctagatggctgcagaaagaacaggcagaaatggcaggcccttgcagaacagcagggatccggaggagctactaacttcagcctgctgaagcaggctggagacgtggaggagaaccctggacctttgagcaagggcgaggaggacaacatggccatcatcaaggagttcatgcgcttcaaggtgcacatggagggctccgtgaacggccacgagttcgagatcgagggcgagggcgagggccgcccctacgagggcacccagaccgccaagctgaaggtgaccaagggcggccccctgcccttcgcctgggacatcctgtcccctcagttcatgtacggctccaaggcctacgtgaagcaccccgccgacatccccgactacttgaagctgtccttccccgagggcttcaagtgggagcgcgtgatgaacttcgaggacggcggcgtggtgaccgtgacccaggactcctccctgcaggacggcgagttcatctacaaggtgaagctgcgcggcaccaacttcccctccgacggccccgtaatgcagaagaagaccatgggctgggaggcctcctccgagcggatgtaccccgaggacggcgccctgaagggcgagatcaagcagaggctgaagctgaaggacggcggccactacgacgccgaggtcaagaccacctacaaggccaagaagcccgtgcagctgcccggcgcctacaacgtcaacatcaagctggacatcacctcccacaacgaggactacaccatcgtggaacagtacgagcgcgccgagggccgccactccaccggcggcatggacgagctgtacaagtaa

SEQ ID NO: 8293 - DNA, 3249 bp, Artificial Sequence
  source: /note="Description of Artificial Sequence: Synthetic polynucleotide"
atggcactgcctgtgaccgccctgctgctgccactggccctgctgctgcacgcagccaggccctatccttacgatgtgcccgactatgctgacatccagatgacacagaccacaagctccctgtccgcctctctgggcgacagagtgaccatcagctgccgggcctcccaggatatctctaagtatctgaactggtaccagcagaagcccgatggcacagtgaagctgctgatctatcacaccagccgcctgcactccggagtgccttctaggttcagcggctccggctctggcacagactacagcctgaccatctccaacctggagcaggaggatatcgccacctatttctgccagcagggcaatacactgccttacacctttggcggcggcacaaagctggagatcaccggaggaggaggcagcggaggaggaggctccggcggcggcggctctgaggtgaagctgcaggagtccggaccaggcctggtggcacctagccagtccctgtctgtgacatgtaccgtgtccggcgtgtctctgccagactacggcgtgtcttggatcaggcagccacctaggaagggcctggagtggctgggcgtgatctggggcagcgagacaacatactataattctgccctgaagagcagactgacaatcatcaaggacaacagcaagtcccaggtgttcctgaagatgaatagcctgcagacagacgataccgccatctactattgcgccaagcactactattacggcggcagctatgccatggattactggggccagggcacatccgtgaccgtgtctagcaccacaaccccagcacctcgcccaccaacaccagcaccaaccatcgcatcccagccactgtctctgaggcccgaggcatgtaggcctgcagcaggaggcgccgtgcacaccaggggcctggactttgcctgcgatatctatatctgggcaccactggcaggaacatgtggcgtgctgctgctgtccctggtcatcaccctgtattgcaagagaggccggaagaagctgctgtacatcttcaagcagcccttcatgaggcccgtgcagacaacccaggaggaggacggctgcagctgtcggttcccagaggaggaggagggaggatgtgagctgagggtgaagttttctaggagcgccgatgcaccagcatataagcagggacagaaccagctgtacaacgagctgaatctgggcaggagagaggagtacgacgtgctggataagaggaggggaagggaccccgagatgggaggcaagccaaggagaaagaacccccaggagggcctgtataatgagctgcagaaggacaagatggccgaggcctactccgagatcggcatgaagggagagcggcgcaggggcaagggacacgatggcctgtatcagggcctgtctacagccaccaaggacacctacgatgcactgcacatgcaggccctgcctccaaggggatccgaagaaacaagagagctacagtcgttagcggctgctgtggtgccatctgcccagacccttaaaattactgactttagcttcagtgactttgagctgtctgatctggaaacagcactgtgtacaattcggatgtttactgacctcaaccttgtgcagaacttccagatgaaacatgaggttctttgcagatggattttaagtgttaagaagaattatcggaagaatgttgcctatcataattggagacatgcctttaatacagctcagtgcatgtttgctgctctaaaagcaggcaaaattcagaacaagctgactgacctggagatacttgcattgctgattgctgcactaagccacgatttggatcaccgtggtgtgaataactcttacatacagcgaagtgaacatccacttgcccagctttactgccattcaatcatggaacaccatcattttgaccagtgcctgatgattcttaatagtccaggcaatcagattctcagtggcctctccattgaagaatataagaccacgttgaaaataatcaagcaagctattttagctacagacctagcactgtacattaagaggcgaggagaattttttgaacttataagaaaaaatcaattcaatttggaagatcctcatcaaaaggagttgtttttggcaatgctgatgacagcttgtgatctttctgcaattacaaaaccctggcctattcaacaacggatagcagaacttgtagcaactgaattttttgatcaaggagacagagagagaaaagaactcaacatagaacccactgatctaatgaacagggagaagaaaaacaaaatcccaagtatgcaagttgggttcatagatgccatctgcttgcaactgtatgaggccctgacccacgtgtcagaggactgtttccctttgctagatggctgcagaaagaacaggcagaaatggcaggcccttgcagaacagcagggtagtctagatggagctactaacttcagcctgctgaagcaggctggagacgtggaggagaaccctggacctttgagcaagggcgaggaggacaacatggccatcatcaaggagttcatgcgcttcaaggtgcacatggagggctccgtgaacggccacgagttcgagatcgagggcgagggcgagggccgcccctacgagggcacccagaccgccaagctgaaggtgaccaagggcggccccctgcccttcgcctgggacatcctgtcccctcagttcatgtacggctccaaggcctacgtgaagcaccccgccgacatccccgactacttgaagctgtccttccccgagggcttcaagtgggagcgcgtgatgaacttcgaggacggcggcgtggtgaccgtgacccaggactcctccctgcaggacggcgagttcatctacaaggtgaagctgcgcggcaccaacttcccctccgacggccccgtaatgcagaagaagaccatgggctgggaggcctcctccgagcggatgtaccccgaggacggcgccctgaagggcgagatcaagcagaggctgaagctgaaggacggcggccactacgacgccgaggtcaagaccacctacaaggccaagaagcccgtgcagctgcccggcgcctacaacgtcaacatcaagctggacatcacctcccacaacgaggactacaccatcgtggaacagtacgagcgcgccgagggccgccactccaccggcggcatggacgagctgtacaagtaa

SEQ ID NO: 8294 - DNA, 3249 bp, Artificial Sequence
  source: /note="Description of Artificial Sequence: Synthetic polynucleotide"
atggcactgcctgtgaccgccctgctgctgccactggccctgctgctgcacgcagccaggccctatccttacgatgtgcccgactatgctgacatccagatgacacagaccacaagctccctgtccgcctctctgggcgacagagtgaccatcagctgccgggcctcccaggatatctctaagtatctgaactggtaccagcagaagcccgatggcacagtgaagctgctgatctatcacaccagccgcctgcactccggagtgccttctaggttcagcggctccggctctggcacagactacagcctgaccatctccaacctggagcaggaggatatcgccacctatttctgccagcagggcaatacactgccttacacctttggcggcggcacaaagctggagatcaccggaggaggaggcagcggaggaggaggctccggcggcggcggctctgaggtgaagctgcaggagtccggaccaggcctggtggcacctagccagtccctgtctgtgacatgtaccgtgtccggcgtgtctctgccagactacggcgtgtcttggatcaggcagccacctaggaagggcctggagtggctgggcgtgatctggggcagcgagacaacatactataattctgccctgaagagcagactgacaatcatcaaggacaacagcaagtcccaggtgttcctgaagatgaatagcctgcagacagacgataccgccatctactattgcgccaagcactactattacggcggcagctatgccatggattactggggccagggcacatccgtgaccgtgtctagcaccacaaccccagcacctcgcccaccaacaccagcaccaaccatcgcatcccagccactgtctctgaggcccgaggcatgtaggcctgcagcaggaggcgccgtgcacaccaggggcctggactttgcctgcgatatctatatctgggcaccactggcaggaacatgtggcgtgctgctgctgtccctggtcatcaccctgtattgcaagagaggccggaagaagctgctgtacatcttcaagcagcccttcatgaggcccgtgcagacaacccaggaggaggacggctgcagctgtcggttcccagaggaggaggagggaggatgtgagctgagggtgaagttttctaggagcgccgatgcaccagcatataagcagggacagaaccagctgtacaacgagctgaatctgggcaggagagaggagtacgacgtgctggataagaggaggggaagggaccccgagatgggaggcaagccaaggagaaagaacccccaggagggcctgtataatgagctgcagaaggacaagatggccgaggcctactccgagatcggcatgaagggagagcggcgcaggggcaagggacacgatggcctgtatcagggcctgtctacagccaccaaggacacctacgatgcactgcacatgcaggccctgcctccaaggggatccgaagaaacaagagagctacagtcgttagcggctgctgtggtgccatctgcccagacccttaaaattactgactttagcttcagtgactttgagctgtctgatctggaaacagcactgtgtacaattcggatgtttactgacctcaaccttgtgcagaacttccagatgaaacatgaggttctttgcagatggattttaagtgttaagaagaattatcggaagaatgttgcctatcataattggagacatgcctttaatacagctcagtgcatgtttgctgctctaaaagcaggcaaaattcagaacaagctgactgacctggagatacttgcattgctgattgctgcactaagccacgatttggatcaccgtggtgtgaataactcttacatacagcgaagtgaacatccacttgcccagctttactgccattcaatcatggaacaccatcattttgaccagtgcctgatgattcttaatagtccaggcaatcagattctcagtggcctctccattgaagaatataagaccacgttgaaaataatcaagcaagctattttagctacagacctagcactgtacattaagaggctaggagaattttttgaacttataagaaaaaatcaattcaatttggaagatcctcatcaaaaggagttgtttttggcaatgctgatgacagcttgtgatctttctgcaattacaaaaccctggcctattcaacaacggatagcagaacttgtagcaactgaattttttgatcaaggagacagagagagaaaagaactcaacatagaacccactgatctaatgaacagggagaagaaaaacaaaatcccaagtatgcaagttgggttcatagatgccatctgcttgcaactgtatgaggccctgacccacgtgtcagaggactgtttccctttgctagatggctgcagaaagaacaggcagaaatggcaggcccttgcagaacagcagggtagtctagatggagctactaacttcagcctgctgaagcaggctggagacgtggaggagaaccctggacctttgagcaagggcgaggaggacaacatggccatcatcaaggagttcatgcgcttcaaggtgcacatggagggctccgtgaacggccacgagttcgagatcgagggcgagggcgagggccgcccctacgagggcacccagaccgccaagctgaaggtgaccaagggcggccccctgcccttcgcctgggacatcctgtcccctcagttcatgtacggctccaaggcctacgtgaagcaccccgccgacatccccgactacttgaagctgtccttccccgagggcttcaagtgggagcgcgtgatgaacttcgaggacggcggcgtggtgaccgtgacccaggactcctccctgcaggacggcgagttcatctacaaggtgaagctgcgcggcaccaacttcccctccgacggccccgtaatgcagaagaagaccatgggctgggaggcctcctccgagcggatgtaccccgaggacggcgccctgaagggcgagatcaagcagaggctgaagctgaaggacggcggccactacgacgccgaggtcaagaccacctacaaggccaagaagcccgtgcagctgcccggcgcctacaacgtcaacatcaagctggacatcacctcccacaacgaggactacaccatcgtggaacagtacgagcgcgccgagggccgccactccaccggcggcatggacgagctgtacaagtaa

SEQ ID NO: 8295 - DNA, 2445 bp, Artificial Sequence
  source: /note="Description of Artificial Sequence: Synthetic polynucleotide"
atggccttaccagtgaccgccttgctcctgccgctggccttgctgctccacgccgccaggccggacatccagatgacacagactacatcctccctgtctgcctctctgggagacagagtcaccatcagttgcagggcaagtcaggacattagtaaatatttaaattggtatcagcagaaaccagatggaactgttaaactcctgatctaccatacatcaagattacactcaggagtcccatcaaggttcagtggcagtgggtctggaacagattattctctcaccattagcaacctggagcaagaagatattgccacttacttttgccaacagggtaatacgcttccgtacacgttcggaggggggaccaagctggagatcacaggtggcggtggctcgggcggtggtgggtcgggtggcggcggatctgaggtgaaactgcaggagtcaggacctggcctggtggcgccctcacagagcctgtccgtcacatgcactgtctcaggggtctcattacccgactatggtgtaagctggattcgccagcctccacgaaagggtctggagtggctgggagtaatatggggtagtgaaaccacatactataattcagctctcaaatccagactgaccatcatcaaggacaactccaagagccaagttttcttaaaaatgaacagtctgcaaactgatgacacagccatttactactgtgccaaacattattactacggtggtagctatgctatggactactggggccaaggaacctcagtcaccgtctcctcaaccacgacgccagcgccgcgaccaccaacaccggcgcccaccatcgcgtcgcagcccctgtccctgcgcccagaggcgtgccggccagcggcggggggcgcagtgcacacgagggggctggacttcgcctgtgatatctacatctgggcgcccttggccgggacttgtggggtccttctcctgtcactggttatcaccctttactgcaaacggggcagaaagaaactcctgtatatattcaaacaaccatttatgagaccagtacaaactactcaagaggaagatggctgtagctgccgatttccagaagaagaagaaggaggatgtgaactgagagtgaagttcagcaggagcgcagacgcccccgcgtacaagcagggccagaaccagctctataacgagctcaatctaggacgaagagaggagtacgatgttttggacaagagacgtggccgggaccctgagatggggggaaagccgagaaggaagaaccctcaggaaggcctgtacaatgaactgcagaaagataagatggcggaggcctacagtgagattgggatgaaaggcgagcgccggaggggcaaggggcacgatggcctttaccagggtctcagtacagccaccaaggacacctacgacgcccttcacatgcaggccctgccccctcgcggatccgaagaaacaagagagctacagtcgttagcggctgctgtggtgccatctgcccagacccttaaaattactgactttagcttcagtgactttgagctgtctgatctggaaacagcactgtgtacaattcggatgtttactgacctcaaccttgtgcagaacttccagatgaaacatgaggttctttgcagatggattttaagtgttaagaagaattatcggaagaatgttgcctatcataattggagacatgcctttaatacagctcagtgcatgtttgctgctctaaaagcaggcaaaattcagaacaagctgactgacctggagatacttgcattgctgattgctgcactaagccacgatttggatcaccgtggtgtgaataactcttacatacagcgaagtgaacatccacttgcccagctttactgccattcaatcatggaacaccatcattttgaccagtgcctgatgattcttaatagtccaggcaatcagattctcagtggcctctccattgaagaatataagaccacgttgaaaataatcaagcaagctattttagctacagacctagcactgtacattaagaggctaggagaattttttgaacttataagaaaaaatcaattcaatttggaagatcctcatcaaaaggagttgtttttggcaatgctgatgacagcttgtgatctttctgcaattacaaaaccctggcctattcaacaacggatagcagaacttgtagcaactgaattttttgatcaaggagacagagagagaaaagaactcaacatagaacccactgatctaatgaacagggagaagaaaaacaaaatcccaagtatgcaagttgggttcatagatgccatctgcttgcaactgtatgaggccctgacccacgtgtcagaggactgtttccctttgctagatggctgcagaaagaacaggcagaaatggcaggcccttgcagaacagcagtga

SEQ ID NO: 8296 - DNA, 2445 bp, Artificial Sequence
  source: /note="Description of Artificial Sequence: Synthetic polynucleotide"
atggccttaccagtgaccgccttgctcctgccgctggccttgctgctccacgccgccaggccggacatccagatgacacagactacatcctccctgtctgcctctctgggagacagagtcaccatcagttgcagggcaagtcaggacattagtaaatatttaaattggtatcagcagaaaccagatggaactgttaaactcctgatctaccatacatcaagattacactcaggagtcccatcaaggttcagtggcagtgggtctggaacagattattctctcaccattagcaacctggagcaagaagatattgccacttacttttgccaacagggtaatacgcttccgtacacgttcggaggggggaccaagctggagatcacaggtggcggtggctcgggcggtggtgggtcgggtggcggcggatctgaggtgaaactgcaggagtcaggacctggcctggtggcgccctcacagagcctgtccgtcacatgcactgtctcaggggtctcattacccgactatggtgtaagctggattcgccagcctccacgaaagggtctggagtggctgggagtaatatggggtagtgaaaccacatactataattcagctctcaaatccagactgaccatcatcaaggacaactccaagagccaagttttcttaaaaatgaacagtctgcaaactgatgacacagccatttactactgtgccaaacattattactacggtggtagctatgctatggactactggggccaaggaacctcagtcaccgtctcctcaaccacgacgccagcgccgcgaccaccaacaccggcgcccaccatcgcgtcgcagcccctgtccctgcgcccagaggcgtgccggccagcggcggggggcgcagtgcacacgagggggctggacttcgcctgtgatatctacatctgggcgcccttggccgggacttgtggggtccttctcctgtcactggttatcaccctttactgcaaacggggcagaaagaaactcctgtatatattcaaacaaccatttatgagaccagtacaaactactcaagaggaagatggctgtagctgccgatttccagaagaagaagaaggaggatgtgaactgagagtgaagttcagcaggagcgcagacgcccccgcgtacaagcagggccagaaccagctctataacgagctcaatctaggacgaagagaggagtacgatgttttggacaagagacgtggccgggaccctgagatggggggaaagccgagaaggaagaaccctcaggaaggcctgtacaatgaactgcagaaagataagatggcggaggcctacagtgagattgggatgaaaggcgagcgccggaggggcaaggggcacgatggcctttaccagggtctcagtacagccaccaaggacacctacgacgcccttcacatgcaggccctgccccctcgcggatccgaagaaacaagagagctacagtcgttagcggctgctgtggtgccatctgcccagacccttaaaattactgactttagcttcagtgactttgagctgtctgatctggaaacagcactgtgtacaattcggatgtttactgacctcaaccttgtgcagaacttccagatgaaacatgaggttctttgcagatggattttaagtgttaagaagaattatcggaagaatgttgcctatcataattggagacatgcctttaatacagctcagtgcatgtttgctgctctaaaagcaggcaaaattcagaacaagctgactgacctggagatacttgcattgctgattgctgcactaagcgccgatttggatcaccgtggtgtgaataactcttacatacagcgaagtgaacatccacttgcccagctttactgccattcaatcatggaacaccatcattttgaccagtgcctgatgattcttaatagtccaggcaatcagattctcagtggcctctccattgaagaatataagaccacgttgaaaataatcaagcaagctattttagctacagacctagcactgtacattaagaggcgaggagaattttttgaacttataagaaaaaatcaattcaatttggaagatcctcatcaaaaggagttgtttttggcaatgctgatgacagcttgtgatctttctgcaattacaaaaccctggcctattcaacaacggatagcagaacttgtagcaactgaattttttgatcaaggagacagagagagaaaagaactcaacatagaacccactgatctaatgaacagggagaagaaaaacaaaatcccaagtatgcaagttgggttcatagatgccatctgcttgcaactgtatgaggccctgacccacgtgtcagaggactgtttccctttgctagatggctgcagaaagaacaggcagaaatggcaggcccttgcagaacagcagtga

SEQ ID NO: 8297 - DNA, 2445 bp, Artificial Sequence
  source: /note="Description of Artificial Sequence: Synthetic polynucleotide"
atggccttaccagtgaccgccttgctcctgccgctggccttgctgctccacgccgccaggccggacatccagatgacacagactacatcctccctgtctgcctctctgggagacagagtcaccatcagttgcagggcaagtcaggacattagtaaatatttaaattggtatcagcagaaaccagatggaactgttaaactcctgatctaccatacatcaagattacactcaggagtcccatcaaggttcagtggcagtgggtctggaacagattattctctcaccattagcaacctggagcaagaagatattgccacttacttttgccaacagggtaatacgcttccgtacacgttcggaggggggaccaagctggagatcacaggtggcggtggctcgggcggtggtgggtcgggtggcggcggatctgaggtgaaactgcaggagtcaggacctggcctggtggcgccctcacagagcctgtccgtcacatgcactgtctcaggggtctcattacccgactatggtgtaagctggattcgccagcctccacgaaagggtctggagtggctgggagtaatatggggtagtgaaaccacatactataattcagctctcaaatccagactgaccatcatcaaggacaactccaagagccaagttttcttaaaaatgaacagtctgcaaactgatgacacagccatttactactgtgccaaacattattactacggtggtagctatgctatggactactggggccaaggaacctcagtcaccgtctcctcaaccacgacgccagcgccgcgaccaccaacaccggcgcccaccatcgcgtcgcagcccctgtccctgcgcccagaggcgtgccggccagcggcggggggcgcagtgcacacgagggggctggacttcgcctgtgatatctacatctgggcgcccttggccgggacttgtggggtccttctcctgtcactggttatcaccctttactgcaaacggggcagaaagaaactcctgtatatattcaaacaaccatttatgagaccagtacaaactactcaagaggaagatggctgtagctgccgatttccagaagaagaagaaggaggatgtgaactgagagtgaagttcagcaggagcgcagacgcccccgcgtacaagcagggccagaaccagctctataacgagctcaatctaggacgaagagaggagtacgatgttttggacaagagacgtggccgggaccctgagatggggggaaagccgagaaggaagaaccctcaggaaggcctgtacaatgaactgcagaaagataagatggcggaggcctacagtgagattgggatgaaaggcgagcgccggaggggcaaggggcacgatggcctttaccagggtctcagtacagccaccaaggacacctacgacgcccttcacatgcaggccctgccccctcgcggatccgaagaaacaagagagctacagtcgttagcggctgctgtggtgccatctgcccagacccttaaaattactgactttagcttcagtgactttgagctgtctgatctggaaacagcactgtgtacaattcggatgtttactgacctcaaccttgtgcagaacttccagatgaaacatgaggttctttgcagatggattttaagtgttaagaagaattatcggaagaatgttgcctatcataattggagacatgcctttaatacagctcagtgcatgtttgctgctctaaaagcaggcaaaattcagaacaagctgactgacctggagatacttgcattgctgattgctgcactaagcgccgatttggatcaccgtggtgtgaataactcttacatacagcgaagtgaacatccacttgcccagctttactgccattcaatcatggaacaccatcattttgaccagtgcctgatgattcttaatagtccaggcaatcagattctcagtggcctctccattgaagaatataagaccacgttgaaaataatcaagcaagctattttagctacagacctagcactgtacattaagaggctaggagaattttttgaacttataagaaaaaatcaattcaatttggaagatcctcatcaaaaggagttgtttttggcaatgctgatgacagcttgtgatctttctgcaattacaaaaccctggcctattcaacaacggatagcagaacttgtagcaactgaattttttgatcaaggagacagagagagaaaagaactcaacatagaacccactgatctaatgaacagggagaagaaaaacaaaatcccaagtatgcaagttgggttcatagatgccatctgcttgcaactgtatgaggccctgacccacgtgtcagaggactgtttccctttgctagatggctgcagaaagaacaggcagaaatggcaggcccttgcagaacagcagtga

SEQ ID NO: 8298 - DNA, 2445 bp, Artificial Sequence
  source: /note="Description of Artificial Sequence: Synthetic polynucleotide"
atggccttaccagtgaccgccttgctcctgccgctggccttgctgctccacgccgccaggccggacatccagatgacacagactacatcctccctgtctgcctctctgggagacagagtcaccatcagttgcagggcaagtcaggacattagtaaatatttaaattggtatcagcagaaaccagatggaactgttaaactcctgatctaccatacatcaagattacactcaggagtcccatcaaggttcagtggcagtgggtctggaacagattattctctcaccattagcaacctggagcaagaagatattgccacttacttttgccaacagggtaatacgcttccgtacacgttcggaggggggaccaagctggagatcacaggtggcggtggctcgggcggtggtgggtcgggtggcggcggatctgaggtgaaactgcaggagtcaggacctggcctggtggcgccctcacagagcctgtccgtcacatgcactgtctcaggggtctcattacccgactatggtgtaagctggattcgccagcctccacgaaagggtctggagtggctgggagtaatatggggtagtgaaaccacatactataattcagctctcaaatccagactgaccatcatcaaggacaactccaagagccaagttttcttaaaaatgaacagtctgcaaactgatgacacagccatttactactgtgccaaacattattactacggtggtagctatgctatggactactggggccaaggaacctcagtcaccgtctcctcaaccacgacgccagcgccgcgaccaccaacaccggcgcccaccatcgcgtcgcagcccctgtccctgcgcccagaggcgtgccggccagcggcggggggcgcagtgcacacgagggggctggacttcgcctgtgatatctacatctgggcgcccttggccgggacttgtggggtccttctcctgtcactggttatcaccctttactgcaaacggggcagaaagaaactcctgtatatattcaaacaaccatttatgagaccagtacaaactactcaagaggaagatggctgtagctgccgatttccagaagaagaagaaggaggatgtgaactgagagtgaagttcagcaggagcgcagacgcccccgcgtacaagcagggccagaaccagctctataacgagctcaatctaggacgaagagaggagtacgatgttttggacaagagacgtggccgggaccctgagatggggggaaagccgagaaggaagaaccctcaggaaggcctgtacaatgaactgcagaaagataagatggcggaggcctacagtgagattgggatgaaaggcgagcgccggaggggcaaggggcacgatggcctttaccagggtctcagtacagccaccaaggacacctacgacgcccttcacatgcaggccctgccccctcgcggatccgaagaaacaagagagctacagtcgttagcggctgctgtggtgccatctgcccagacccttaaaattactgactttagcttcagtgactttgagctgtctgatctggaaacagcactgtgtacaattcggatgtttactgacctcaaccttgtgcagaacttccagatgaaacatgaggttctttgcagatggattttaagtgttaagaagaattatcggaagaatgttgcctatcataattggagacatgcctttaatacagctcagtgcatgtttgctgctctaaaagcaggcaaaattcagaacaagctgactgacctggagatacttgcattgctgattgctgcactaagccacgatttggatcaccgtggtgtgaataactcttacatacagcgaagtgaacatccacttgcccagctttactgccattcaatcatggaacaccatcattttgaccagtgcctgatgattcttaatagtccaggcaatcagattctcagtggcctctccattgaagaatataagaccacgttgaaaataatcaagcaagctattttagctacagacctagcactgtacattaagaggctaggagaattttttgaacttataagaaaaaatcaattcaatttggaagatcctcatcaaaaggagttgtttttggcaatgctgatgacagcttgtgccctttctgcaattacaaaaccctggcctattcaacaacggatagcagaacttgtagcaactgaattttttgatcaaggagacagagagagaaaagaactcaacatagaacccactgatctaatgaacagggagaagaaaaacaaaatcccaagtatgcaagttgggttcatagatgccatctgcttgcaactgtatgaggccctgacccacgtgtcagaggactgtttccctttgctagatggctgcagaaagaacaggcagaaatggcaggcccttgcagaacagcagtga

SEQ ID NO: 8299 - protein, 133 aa, Homo sapiens [sequence omitted]

SEQ ID NO: 8300 - DNA, 402 bp, Homo sapiens
gcacctacttcaagttctacaaagaaaacacagctacaactggagcatttactgctggatttacagatgattttgaatggaattaataattacaagaatcccaaactcaccaggatgctcacatttaagttttacatgcccaagaaggccacagaactgaaacatcttcagtgtctagaagaagaactcaaacctctggaggaagtgctaaatttagctcaaagcaaaaactttcacttaagacccagggacttaatcagcaatatcaacgtaatagttctggaactaaagggatctgaaacaacattcatgtgtgaatatgctgatgagacagcaaccattgtagaatttctgaacagatggattaccttttgtcaaagcatcatctcaacactgacttga

SEQ ID NO: 8301 - DNA, 402 bp, Artificial Sequence
  source: /note="Description of Artificial Sequence: Synthetic polynucleotide"
gcgccaactagtagcagcacaaaaaagacacagcttcaactggagcacctgctgctggacctgcagatgatccttaacggaatcaacaactacaagaaccccaagctgaccaggatgctgacgtttaagttttacatgcccaagaaggccaccgaactcaaacacctgcaatgcctggaggaagagctgaaaccgcttgaggaagtgttgaacctggcccaaagcaagaatttccacctgaggcccagggacctgataagcaacatcaacgtgatcgtgctggaactgaagggtagcgagaccaccttcatgtgcgagtacgccgacgagaccgcaaccatcgtggagttcctgaaccgatggataacattctgccagagcatcattagcactctgacctga

SEQ ID NO: 8302 - protein, 306 aa, Homo sapiens
IWELKKDVYVVELDWYPDAPGEMVVLTCDTPEEDGITWTLDQSSEVLGSGKTLTIQVKEFGDAGQYTCHKGGEVLSHSLLLLHKKEDGIWSTDILKDQKEPKNKTFLRCEAKNYSGRFTCWWLTTISTDLTFSVKSSRGSSDPQGVTCGAATLSAERVRGDNKEYEYSVECQEDSACPAAEESLPIEVMVDAVHKLKYENYTSSFFIRDIIKPDPPKNLQLKPLKNSRQVEVSWEYPDTWSTPHSYFSLTFCVQVQGKSKREKKDRVFTDKTSATVICRKNASISVRAQDRYYSSSWSEWASVPCS

SEQ ID NO: 8303 - DNA, 921 bp, Homo sapiens
atatgggaactgaagaaagatgtttatgtcgtagaattggattggtatccggatgcccctggagaaatggtggtcctcacctgtgacacccctgaagaagatggtatcacctggaccttggaccagagcagtgaggtcttaggctctggcaaaaccctgaccatccaagtcaaagagtttggagatgctggccagtacacctgtcacaaaggaggcgaggttctaagccattcgctcctgctgcttcacaaaaaggaagatggaatttggtccactgatattttaaaggaccagaaagaacccaaaaataagacctttctaagatgcgaggccaagaattattctggacgtttcacctgctggtggctgacgacaatcagtactgatttgacattcagtgtcaaaagcagcagaggctcttctgacccccaaggggtgacgtgcggagctgctacactctctgcagagagagtcagaggggacaacaaggagtatgagtactcagtggagtgccaggaggacagtgcctgcccagctgctgaggagagtctgcccattgaggtcatggtggatgccgttcacaagctcaagtatgaaaactacaccagcagcttcttcatcagggacatcatcaaacctgacccacccaagaacttgcagctgaagccattaaagaattctcggcaggtggaggtcagctgggagtaccctgacacctggagtactccacattcctacttctccctgacattctgcgttcaggtccagggcaagagcaagagagaaaagaaagatagagtcttcacggacaagacctcagccacggtcatctgccgcaaaaatgccagcattagcgtgcgggcccaggaccgctactatagctcatcttggagcgaatgggcatctgtgccctgcagttag

SEQ ID NO: 8304 - DNA, 918 bp, Artificial Sequence
  source: /note="Description of Artificial Sequence: Synthetic polynucleotide"
atctgggagctgaagaaggacgtgtacgtggtggagctggactggtatcccgatgcccctggcgagatggtggtgctgacctgcgacacacctgaggaggatggcatcacctggacactggatcagtctagcgaggtgctgggcagcggcaagaccctgacaatccaggtgaaggagttcggcgacgccggccagtacacatgtcacaagggcggcgaggtgctgtctcacagcctgctgctgctgcacaagaaggaggacggcatttggtccacagacatcctgaaggatcagaaggagccaaagaacaagaccttcctgcggtgcgaggccaagaattatagcggccggttcacctgttggtggctgaccacaatcagcaccgatctgacattttccgtgaagtcctctaggggcagctccgacccccagggcgtgacatgcggagcagccaccctgtccgccgagagggtgcgcggcgataacaaggagtacgagtattccgtggagtgccaggaggactctgcctgtccagcagcagaggagagcctgcctatcgaagtgatggtggatgccgtgcacaagctgaagtacgagaattatacatctagcttctttatccgggacatcatcaagcccgatccacccaagaacctgcagctgaagcctctgaagaattctagacaggtggaggtgagctgggagtacccagacacctggtccacaccccactcttatttcagcctgaccttttgcgtgcaggtgcagggcaagagcaagagggagaagaaggaccgcgtgttcaccgataagacatccgccaccgtgatctgtaggaagaacgcctccatctctgtgagggcccaggatcgctactattcctctagctggtccgagtgggcctctgtgccctgtagc

SEQ ID NO: 8305 - DNA, 918 bp, Artificial Sequence
  source: /note="Description of Artificial Sequence: Synthetic polynucleotide"
atctgggagctgaagaaggacgtgtacgtggtggagctggactggtatcccgatgcccctggcgagatggtggtgctgacctgcgacacaccagaggaggatggcatcacctggacactggatcagtctagcgaggtgctgggcagcggcaagaccctgacaatccaggtgaaggagttcggcgacgccggccagtacacatgtcacaagggcggcgaggtgctgtctcacagcctgctgctgctgcacaagaaggaggacggcatttggtccacagacatcctgaaggatcagaaggagccaaagaacaagaccttcctgcggtgcgaggccaagaattatagcggccggttcacctgttggtggctgaccacaatcagcaccgatctgacattttccgtgaagtcctctaggggcagctccgacccccagggcgtgacatgcggagcagccaccctgtccgccgagagggtgcgcggcgataacaaggagtacgagtattccgtggagtgccaggaggactctgcctgtccagcagcagaggagagcctgcctatcgaagtgatggtggatgccgtgcacaagctgaagtacgagaattatacatctagcttctttatccgggacatcatcaagcccgatccacccaagaacctgcagctgaagcctctgaagaattctagacaggtggaggtgagctgggagtacccagacacctggtccacaccccactcttatttcagcctgaccttttgcgtgcaggtgcagggcaagtccaagagggagaagaaggaccgcgtgttcaccgataagacatctgccaccgtgatctgtaggaagaacgcctccatctctgtgagggcccaggatcgctactattcctctagctggtccgagtgggcctctgtgccctgtagc

SEQ ID NO: 8306 - DNA, 918 bp, Artificial Sequence
  source: /note="Description of Artificial Sequence: Synthetic polynucleotide"
atctgggagctgaagaaggacgtgtacgtggtggagctggactggtatcccgatgcccctggcgagatggtggtgctgacctgcgacacacctgaggaggatggcatcacctggacactggatcagtctagcgaggtgctgggctccggcaagaccctgacaatccaggtgaaggagttcggcgacgccggccagtacacatgtcacaagggcggcgaggtgctgtctcacagcctgctgctgctgcacaagaaggaggacggcatctggtccacagacatcctgaaggatcagaaggagccaaagaacaagaccttcctgaggtgcgaggccaagaattatagcggccgctttacctgttggtggctgaccacaatcagcaccgatctgacattttccgtgaagtcctctaggggcagctccgacccccagggcgtgacatgcggagcagccaccctgtccgccgagcgggtgagaggcgataacaaggagtacgagtattccgtggagtgccaggaggactctgcctgtccagcagcagaggagagcctgcctatcgaagtgatggtggatgccgtgcacaagctgaagtacgagaattatacatctagcttctttatcagggacatcatcaagcccgatccacccaagaacctgcagctgaagcctctgaagaattctcgccaggtggaggtgagctgggagtacccagacacctggagcacaccccactcttatttcagcctgaccttttgcgtgcaggtgcagggcaagtctaagcgggagaagaaggacagagtgttcaccgataagacaagcgccaccgtgatctgtcggaagaacgcctccatctctgtgcgggcccaggatagatactattcctctagctggtccgagtgggcctctgtgccctgtagc

SEQ ID NO: 8307 - DNA, 918 bp, Artificial Sequence
  source: /note="Description of Artificial Sequence: Synthetic polynucleotide"
atctgggagctgaagaaggacgtgtacgtggtggagctggactggtatcccgatgcccctggcgagatggtggtgctgacctgcgacacacctgaggaggatggcatcacctggacactggatcagagctccgaggtgctgggaagcggcaagaccctgacaatccaggtgaaggagttcggcgacgccggccagtacacatgtcacaagggcggcgaggtgctgtctcacagcctgctgctgctgcacaagaaggaggacggcatttggtccacagacatcctgaaggatcagaaggagccaaagaacaagaccttcctgaggtgcgaggccaagaattatagcggccgctttacctgttggtggctgaccacaatcagcaccgatctgacattttccgtgaagtctagcagaggctcctctgacccccagggcgtgacatgcggagcagccaccctgtccgccgagcgggtgagaggcgataacaaggagtacgagtattccgtggagtgccaggaggactctgcctgtcctgcagcagaggagagcctgccaatcgaagtgatggtggatgccgtgcacaagctgaagtacgagaattatacaagctccttctttatcagggacatcatcaagcctgatccccctaagaacctgcagctgaagccactgaagaattctcgccaggtggaggtgagctgggagtacccagacacctggtccacaccccactcttatttcagcctgaccttttgcgtgcaggtgcagggcaagagcaagagggagaagaaggaccgcgtgttcaccgataagacatccgccaccgtgatctgtcggaagaacgcctccatctctgtgcgggcccaggatagatactattctagctcctggtccgagtgggcctctgtgccctgtagc

SEQ ID NO: 8308 - DNA, 918 bp, Artificial Sequence
  source: /note="Description of Artificial Sequence: Synthetic polynucleotide"
atctgggagctgaagaaggacgtgtacgtggtggagctggactggtatcccgatgcccctggcgagatggtggtgctgacctgcgacacacctgaggaggatggcatcacctggacactggatcagagctccgaggtgctgggaagcggcaagaccctgacaatccaggtgaaggagttcggcgacgccggccagtacacatgtcacaagggcggcgaggtgctgtctcacagcctgctgctgctgcacaagaaggaggacggcatttggtccacagacatcctgaaggatcagaaggagccaaagaacaagaccttcctgcggtgcgaggccaagaattatagcggccggttcacctgttggtggctgaccacaatcagcaccgatctgacattttccgtgaagtctagccggggctcctctgacccacagggagtgacatgcggagcagccaccctgtccgccgagcgggtgagaggcgataacaaggagtacgagtattccgtggagtgccaggaggactctgcctgtcctgcagcagaggagagcctgccaatcgaagtgatggtggatgccgtgcacaagctgaagtacgagaattatacaagctccttctttatcagggacatcatcaagcctgatccccctaagaacctgcagctgaagccactgaagaattctcgccaggtggaggtgagctgggagtacccagacacctggtccacaccccactcttatttcagcctgaccttttgcgtgcaggtgcagggcaagtccaagcgggagaagaaggacagagtgttcaccgataagacatctgccaccgtgatctgtcggaagaacgcctccatctctgtgagggcccaggatcgctactattctagctcctggagcgagtgggcatccgtgccatgttct

SEQ ID NO: 8309 - DNA, 918 bp, Artificial Sequence
  source: /note="Description of Artificial Sequence: Synthetic polynucleotide"
atctgggagctcaagaaagacgtgtacgtggtggaactggactggtaccccgacgcccctggcgaaatggtggtgctgacatgcgacacccctgaggaggatggcattacctggaccctcgatcagagctccgaggtgctgggcagcggcaaaaccctgaccatccaggtgaaggagtttggcgatgccggccagtacacatgtcacaagggcggcgaggtgctgagccactccctgctgctgctccacaagaaggaagatggcatctggagcaccgacattctgaaggatcagaaggagcccaagaacaagacattcctgaggtgtgaggccaagaactacagcggcaggtttacctgctggtggctgacaacaatcagcaccgacctcacattctccgtcaagtcctccaggggttcttccgaccctcaaggcgtgacatgcggcgctgccaccctgagcgctgagagagtcaggggcgacaacaaggagtacgagtacagcgtcgaatgtcaggaggacagcgcctgtcccgccgctgaagagagcctgcctatcgaggtgatggtggacgccgtgcacaaactgaagtatgagaattacacctccagcttcttcatcagggacatcatcaaacccgatccccccaagaacctgcagctgaagcctctgaagaacagcagacaggtcgaagtgtcctgggagtaccctgatacctggtccacaccccacagctacttcagcctgaccttttgcgtgcaggtgcagggcaagagcaaaagggagaagaaggacagggtgtttaccgacaagacctccgccacagtgatttgcagaaagaacgcctccatcagcgtgagggcccaggacaggtattacagcagctcctggagcgaatgggctagcgtgccctgtagc

SEQ ID NO: 8310 - DNA, 918 bp, Artificial Sequence
  source: /note="Description of Artificial Sequence: Synthetic polynucleotide"
atctgggagctgaagaaggacgtgtacgtggtggagctggactggtatcccgatgcccctggcgagatggtggtgctgacctgcgacacacccgaggaggatggcatcacctggacactggatcagtctagcgaggtgctgggctccggcaagaccctgacaatccaggtgaaggagttcggcgacgccggccagtacacctgtcacaagggcggcgaggtgctgtcccactctctgctgctgctgcacaagaaggaggacggcatctggtctacagacatcctgaaggatcagaaggagcctaagaacaagaccttcctgcggtgcgaggccaagaattatagcggccggttcacctgttggtggctgaccacaatcagcaccgatctgacattttccgtgaagtcctctcggggcagctccgacccacagggagtgacatgcggagcagccaccctgtccgccgagagggtgcgcggcgataacaaggagtacgagtattccgtggagtgccaggaggactctgcctgtccagcagcagaggagagcctgccaatcgaagtgatggtggatgccgtgcacaagctgaagtacgagaattatacatctagcttctttatccgggacatcatcaagcccgatccccctaagaacctgcagctgaagcctctgaagaattctagacaggtggaggtgagctgggagtaccccgacacctggagcacacctcacagctatttctccctgaccttttgcgtgcaggtgcagggcaagtccaagagggagaagaaggaccgcgtgttcaccgataagacatctgccaccgtgatctgtcggaagaacgccagcatctccgtgagggcccaggatcgctactattcctctagctggtctgagtgggccagcgtgccctgttcc

SEQ ID NO: 8311 - DNA, 918 bp, Artificial Sequence
  source: /note="Description of Artificial Sequence: Synthetic polynucleotide"
atctgggagctgaagaaggacgtgtacgtggtggagctggactggtatcctgatgccccaggcgagatggtggtgctgacatgcgacacccccgaggaggatggcatcacatggaccctggatcagtcctctgaggtgctgggctccggcaagacactgaccatccaggtgaaggagttcggcgacgccggccagtacacctgtcacaagggaggagaggtgctgagccactccctgctgctgctgcacaagaaggaggacggcatctggtccaccgacatcctgaaggatcagaaggagcccaagaacaagacattcctgagatgcgaggccaagaattatagcggcaggtttacctgttggtggctgacaaccatctccacagatctgaccttttctgtgaagagctcccggggctctagcgaccctcagggagtgacctgcggagcagccacactgtccgccgagcgggtgagaggcgataacaaggagtacgagtattccgtggagtgccaggaggactctgcctgtcctgcagcagaggagagcctgccaatcgaagtgatggtggatgccgtgcacaagctgaagtacgagaattatacctcctctttctttatcagagacatcatcaagccagatcctccaaagaacctgcagctgaagcccctgaagaatagcaggcaggtggaggtgtcctgggagtacccagacacatggagcaccccccacagctatttctccctgacattttgcgtgcaggtgcagggcaagtccaagcgcgagaagaaggaccgggtgttcacagataagacctctgccacagtgatctgtcgcaagaacgcctctatcagcgtgcgcgcccaggatcggtactatagctcctcttggtctgagtgggccagcgtgccttgttcc

SEQ ID NO: 8312 - DNA, 918 bp, Artificial Sequence
  source: /note="Description of Artificial Sequence: Synthetic polynucleotide"
atctgggagctgaagaaggacgtgtacgtggtggagctggactggtatcccgatgcccctggcgagatggtggtgctgacctgcgacacacctgaggaggatggcatcacctggacactggatcagagctccgaggtgctgggcagcggcaagaccctgacaatccaggtgaaggagttcggcgacgccggccagtacacatgtcacaagggcggcgaggtgctgtctcacagcctgctgctgctgcacaagaaggaggacggcatctggtccacagacatcctgaaggatcagaaggagccaaagaacaagaccttcctgaggtgcgaggccaagaattattctggcaggttcacctgttggtggctgaccacaatcagcaccgatctgacattttccgtgaagtctagccggggctcctctgacccccagggagtgacatgcggagcagccaccctgtccgccgagagggtgagaggcgataacaaggagtacgagtattccgtggagtgccaggaggactctgcctgtcctgcagcagaggagagcctgccaatcgaagtgatggtggatgccgtgcacaagctgaagtacgagaattatacaagctccttctttatcagggacatcatcaagcctgatccccctaagaacctgcagctgaagccactgaagaattctagacaggtggaggtgagctgggagtacccagacacctggagcacaccccactcctatttctctctgaccttttgcgtgcaggtgcagggcaagagcaagagggagaagaaggacagagtgttcaccgataagacatccgccaccgtgatctgtcggaagaacgcctccatctctgtgcgggcccaggatcgctactattctagctcctggagcgagtgggcatccgtgccatgttct

SEQ ID NO: 8313 - protein, 197 aa, Homo sapiens
RNLPVATPDPGMFPCLHHSQNLLRAVSNMLQKARQTLEFYPCTSEEIDHEDITKDKTSTVEACLPLELTKNESCLNSRETSFITNGSCLASRKTSFMMALCLSSIYEDLKMYQVEFKTMNAKLLMDPKRQIFLDQNMLAVIDELMQALNFNSETVPQKSSLEEPDFYKTKIKLCILLHAFRIRAVTIDRVMSYLNAS

SEQ ID NO: 8314 - DNA, 594 bp, Homo sapiens
agaaacctccccgtggccactccagacccaggaatgttcccatgccttcaccactcccaaaacctgctgagggccgtcagcaacatgctccagaaggccagacaaactctagaattttacccttgcacttctgaagagattgatcatgaagatatcacaaaagataaaaccagcacagtggaggcctgtttaccattggaattaaccaagaatgagagttgcctaaattccagagagacctctttcataactaatgggagttgcctggcctccagaaagacctcttttatgatggccctgtgccttagtagtatttatgaagacttgaagatgtaccaggtggagttcaagaccatgaatgcaaagcttctgatggatcctaagaggcagatctttctagatcaaaacatgctggcagttattgatgagctgatgcaggccctgaatttcaacagtgagactgtgccacaaaaatcctcccttgaagaaccggatttttataaaactaaaatcaagctctgcatacttcttcatgctttcagaattcgggcagtgactattgatagagtgatgagctatctgaatgcttcctaa

SEQ ID NO: 8315 - DNA, 594 bp, Artificial Sequence
  source: /note="Description of Artificial Sequence: Synthetic polynucleotide"
cgcaatctgccagtggccacccctgacccaggcatgttcccctgcctgcaccacagccagaacctgctgagggccgtgtccaatatgctgcagaaggcccgccagacactggagttttacccttgtacctctgaggagatcgaccacgaggatatcacaaaggataagaccagcacagtggaggcctgcctgccactggagctgaccaagaacgagtcctgtctgaacagccgggaaaccagcttcatcaccaacggctcctgcctggcctctcgcaagaccagcttcatgatggccctgtgcctgtcctctatctacgaggacctgaagatgtatcaggtggagttcaagaccatgaacgccaagctgctgatggaccctaagcggcagatctttctggatcagaatatgctggccgtgatcgacgagctgatgcaggccctgaacttcaatagcgagacagtgccacagaagagctccctggaggagcccgatttctacaagaccaagatcaagctgtgcatcctgctgcacgcctttcggatcagagccgtgaccatcgacagagtgatgtcctatctgaatgcctcttga

SEQ ID NO: 8316 - DNA, 591 bp, Artificial Sequence
  source: /note="Description of Artificial Sequence: Synthetic polynucleotide"
cgcaatctgccagtggccacccctgacccaggcatgttcccctgcctgcaccacagccagaacctgctgagggccgtgtccaatatgctgcagaaggcccgccagacactggagttttacccttgtaccagcgaggagatcgaccacgaggatatcacaaaggataagacctccacagtggaggcctgcctgccactggagctgaccaagaacgagtcctgtctgaacagccgggaaaccagcttcatcaccaacggctcctgcctggcctctcgcaagaccagcttcatgatggccctgtgcctgtcctctatctacgaggacctgaagatgtatcaggtggagttcaagaccatgaacgccaagctgctgatggaccctaagcggcagatctttctggatcagaatatgctggccgtgatcgacgagctgatgcaggccctgaacttcaatagcgagacagtgccacagaagagctccctggaggagcccgatttctacaagaccaagatcaagctgtgcatcctgctgcacgcctttcggatcagagccgtgaccatcgacagagtgatgtcctatctgaatgcctct

SEQ ID NO: 8317 - DNA, 594 bp, Artificial Sequence
  source: /note="Description of Artificial Sequence: Synthetic polynucleotide"
agaaatctgccagtggccacccctgacccaggcatgttcccctgcctgcaccactctcagaacctgctgcgggccgtgagcaatatgctgcagaaggccagacagacactggagttttacccttgtacctccgaggagatcgaccacgaggatatcacaaaggataagacctctacagtggaggcctgcctgccactggagctgaccaagaacgagtcctgtctgaacagccgggaaaccagcttcatcaccaacggctcctgcctggcctctagaaagaccagcttcatgatggccctgtgcctgtcctctatctacgaggacctgaagatgtatcaggtggagttcaagaccatgaacgccaagctgctgatggaccctaagaggcagatctttctggatcagaatatgctggccgtgatcgacgagctgatgcaggccctgaacttcaatagcgagacagtgccacagaagagctccctggaggagcccgatttctacaagaccaagatcaagctgtgcatcctgctgcacgcctttaggatccgcgccgtgaccatcgaccgcgtgatgtcctatctgaatgcctcttga

SEQ ID NO: 8318 - DNA, 591 bp, Artificial Sequence
  source: /note="Description of Artificial Sequence: Synthetic polynucleotide"
agaaatctgccagtggcaacccctgacccaggaatgttcccttgcctgcaccacagccagaacctgctgcgggccgtgtccaatatgctgcagaaggccagacagacactggagttttacccttgtacctctgaggagatcgaccacgaggatatcacaaaggataagaccagcacagtggaggcctgcctgccactggagctgaccaagaacgagtcctgtctgaacagccgggaaaccagcttcatcaccaacggctcctgcctggcctctcgcaagaccagcttcatgatggccctgtgcctgtctagcatctacgaggacctgaagatgtatcaggtggagttcaagaccatgaacgccaagctgctgatggaccctaagaggcagatctttctggatcagaatatgctggccgtgatcgacgagctgatgcaggccctgaacttcaatagcgagacagtgccacagaagtcctctctggaggagcccgatttctacaagaccaagatcaagctgtgcatcctgctgcacgcctttaggatccgcgccgtgaccatcgacagagtgatgtcctatctgaacgcctct

SEQ ID NO: 8319 - DNA, 591 bp, Artificial Sequence
  source: /note="Description of Artificial Sequence: Synthetic polynucleotide"
agaaatctgccagtggcaacccctgacccaggaatgttcccttgcctgcaccacagccagaacctgctgagggccgtgtccaatatgctgcagaaggcccgccagacactggagttttacccttgtaccagcgaggagatcgaccacgaggatatcacaaaggataagacctccacagtggaggcctgcctgccactggagctgaccaagaacgagagctgtctgaattcccgggagacatctttcatcaccaacggcagctgcctggcctccagaaagacatcttttatgatggccctgtgcctgtctagcatctacgaggacctgaagatgtatcaggtggagttcaagaccatgaacgccaagctgctgatggaccctaagaggcagatctttctggatcagaatatgctggccgtgatcgacgagctgatgcaggccctgaacttcaatagcgagacagtgccacagaagtcctctctggaggagcccgatttctacaagaccaagatcaagctgtgcatcctgctgcacgcctttaggatccgcgccgtgaccatcgaccgcgtgatgtcttatctgaacgcatcc

SEQ ID NO: 8320 - DNA, 591 bp, Artificial Sequence
  source: /note="Description of Artificial Sequence: Synthetic polynucleotide"
agaaacctgcctgtcgctacccccgaccccggaatgttcccctgcctgcaccactcccagaacctcctgagggccgtgtccaacatgctgcagaaggctagacagaccctcgaattctacccctgtaccagcgaggagatcgaccatgaggacatcaccaaggataagaccagcaccgtggaggcttgcctgcctctggagctgaccaaaaacgagagctgcctgaacagcagggaaaccagcttcattaccaacggctcctgcctggcctccaggaagacatccttcatgatggccctgtgcctcagcagcatctacgaggacctgaagatgtatcaggtggagtttaagaccatgaatgccaagctgctgatggaccctaagaggcagatcttcctggaccagaatatgctggccgtgattgacgagctgatgcaggccctcaactttaacagcgagaccgtgccccagaaaagcagcctcgaagagcctgacttctacaaaaccaagattaagctgtgtatcctgctgcacgccttcaggatcagggccgtgaccatcgacagggtgatgagctacctgaacgccagc

SEQ ID NO: 8321 - DNA, 591 bp, Artificial Sequence
  source: /note="Description of Artificial Sequence: Synthetic polynucleotide"
agaaatctgccagtggccacccctgacccaggcatgttcccctgcctgcaccacagccagaacctgctgagggccgtgtccaatatgctgcagaaggcccgccagacactggagttttacccctgtaccagcgaggagatcgaccacgaggatatcacaaaggataagacctccacagtggaggcctgcctgcctctggagctgaccaagaacgagtcttgtctgaatagcagggagacatccttcatcaccaacggctcttgcctggccagccgcaagacatcctttatgatggccctgtgcctgtcctctatctacgaggacctgaagatgtatcaggtggagttcaagaccatgaacgccaagctgctgatggaccctaagaggcagatctttctggatcagaatatgctggccgtgatcgacgagctgatgcaggccctgaacttcaattccgagacagtgcctcagaagagctccctggaggagccagatttctacaagaccaagatcaagctgtgcatcctgctgcacgcctttcggatcagagccgtgaccatcgaccgcgtgatgtcttatctgaatgccagc

SEQ ID NO: 8322 - DNA, 591 bp, Artificial Sequence
  source: /note="Description of Artificial Sequence: Synthetic polynucleotide"
cggaatctgcctgtggcaacccccgaccctggaatgttcccatgcctgcaccacagccagaacctgctgcgcgccgtgtccaatatgctgcagaaggcccggcagaccctggagttttacccatgtacaagcgaggagatcgaccacgaggatatcaccaaggataagacatccaccgtggaggcatgcctgccactggagctgacaaagaacgagtcttgtctgaacagccgggagacaagcttcatcacaaacggctcttgcctggccagccggaagacctcctttatgatggccctgtgcctgagctccatctacgaggacctgaagatgtatcaggtggagttcaagacaatgaacgccaagctgctgatggaccccaagcgccagatctttctggatcagaatatgctggccgtgatcgacgagctgatgcaggccctgaactttaatagcgagacagtgccccagaagtctagcctggaggagcctgatttctacaagacaaagatcaagctgtgcatcctgctgcacgccttccggatcagagccgtgaccatcgacagagtgatgtcttatctgaatgccagc

SEQ ID NO: 8323 - DNA, 591 bp, Artificial Sequence
  source: /note="Description of Artificial Sequence: Synthetic polynucleotide"
cgcaatctgccagtggcaacccctgacccaggaatgttcccttgcctgcaccacagccagaacctgctgcgggccgtgtccaatatgctgcagaaggcccgccagacactggagttttacccttgtacctctgaggagatcgaccacgaggatatcacaaaggataagaccagcacagtggaggcctgcctgccactggagctgaccaagaacgagagctgtctgaattccagggagacatctttcatcaccaacggcagctgcctggcctccagaaagacatcttttatgatggccctgtgcctgtctagcatctacgaggacctgaagatgtatcaggtggagttcaagaccatgaacgccaagctgctgatggaccctaagaggcagatctttctggatcagaatatgctggccgtgatcgacgagctgatgcaggccctgaacttcaattccgagacagtgccacagaagtcctctctggaggagcccgatttctacaagaccaagatcaagctgtgcatcctgctgcacgccttcaggatcagggccgtgaccatcgacagagtgatgagctatctgaacgccagc

SEQ ID NO: 8324 - protein, 114 aa, Homo sapiens
NWVNVISDLKKIEDLIQSMHIDATLYTESDVHPSCKVTAMKCFLLELQVISLESGDASIHDTVENLIILANNSLSSNGNVTESGCKECEELEEKNIKEFLQSFVHIVQMFINTS

SEQ ID NO: 8325 - DNA, 345 bp, Homo sapiens
aactgggtgaatgtaataagtgatttgaaaaaaattgaagatcttattcaatctatgcatattgatgctactttatatacggaaagtgatgttcaccccagttgcaaagtaacagcaatgaagtgctttctcttggagttacaagttatttcacttgagtccggagatgcaagtattcatgatacagtagaaaatctgatcatcctagcaaacaacagtttgtcttctaatgggaatgtaacagaatctggatgcaaagaatgtgaggaactggaggaaaaaaatattaaagaatttttgcagagttttgtacatattgtccaaatgttcatcaacacttcttga

SEQ ID NO: 8326 - DNA, 342 bp, Artificial Sequence
  source: /note="Description of Artificial Sequence: Synthetic polynucleotide"
aactgggtgaacgtgatctccgacctgaaaaagatcgaggatttgatccagagcatgcacattgacgccaccctgtataccgagtccgacgtgcacccgagttgcaaggtgactgccatgaagtgcttcctgctggagctgcaagtgatcagcctggagagcggcgacgccagcatccacgacaccgtggaaaaccttatcattctggccaacaatagcctgagcagcaacggcaacgtgaccgaaagcggatgtaaggaatgcgaggaactggaagagaagaatatcaaagaattcctgcaaagcttcgtgcacatcgtgcagatgttcatcaacacttct

SEQ ID NO: 8327 - DNA, 345 bp, Artificial Sequence
  source: /note="Description of Artificial Sequence: Synthetic polynucleotide"
aactgggtgaacgtgatctccgacctgaagaagatcgaggacctgatccagtccatgcacatcgacgccaccctgtacaccgagagcgacgtgcaccctagctgcaaggtgaccgccatgaagtgcttcctgctggagctgcaggtgatcagcctggagagcggcgatgccagcatccacgacacagtggagaacctgatcatcctggccaacaacagcctgagcagcaacggcaatgtgaccgagagcggctgcaaggagtgcgaggagctggaggagaagaacatcaaggagttcctgcagtccttcgtgcacatcgtgcagatgttcatcaacaccagctaa

SEQ ID NO: 8328 - DNA, 345 bp, Artificial Sequence
  source: /note="Description of Artificial Sequence: Synthetic polynucleotide"
aactgggtcaacgtgatcagcgacctgaagaagatcgaggacctcatccagtccatgcacattgacgccaccctgtacaccgagtccgatgtgcaccctagctgcaaggtgaccgccatgaaatgcttcctgctggagctgcaggtcatctccttagaaagcggcgatgcctccatccacgacaccgtggagaacctgatcatcctggccaataactccctgagcagcaacggcaacgtgaccgagagcggctgcaaagagtgtgaagagctggaggagaagaacattaaggagttcctgcagagcttcgtgcacatcgtgcaaatgttcatcaacaccagctaa

SEQ ID NO: 8329 - protein, 237 aa, Homo sapiens
ITCPPPMSVEHADIWVKSYSLYSRERYICNSGFKRKAGTSSLTECVLNKATNVAHWTTPSLKCIRDPALVHQRPAPPSTVTTAGVTPQPESLSPSGKEPAASSPSSNNTAATTAAIVPGSQLMPSKSPSTGTTEISSHESSHGTPSQTTAKNWELTASASHQPPGVYPQGHSDTTVAISTSTVLLCGLSAVSLLACYLKSRQTPPLASVEMEAMEALPVTWGTSSRDEDLENCSHHL

SEQ ID NO: 8330 - protein, 6 aa, Artificial Sequence
  source: /note="Description of Artificial Sequence: Synthetic Linker"
GSGSGS

SEQ ID NO: 8331 - protein, 8 aa, Artificial Sequence
  source: /note="Description of Artificial Sequence: Synthetic Linker"
GSGSGSGS

SEQ ID NO: 8332 - protein, 10 aa, Artificial Sequence
  source: /note="Description of Artificial Sequence: Synthetic Linker"
GSGSGGGSGS

SEQ ID NO: 8333 - protein, 8 aa, Artificial Sequence
  source: /note="Description of Artificial Sequence: Synthetic Tag"
DYKDDDDK

SEQ ID NO: 8334 - protein, 723 aa, Artificial Sequence
  source: /note="Description of Artificial Sequence: Synthetic Construct"
MDWTWILFLVAAATRVHSNWVNVISDLKKIEDLIQSMHIDATLYTESDVHPSCKVTAMKCFLLELQVISLESGDASIHDTVENLIILANNSLSSNGNVTESGCKECEELEEKNIKEFLQSFVHIVQMFINTSSGGGSGGGGSGGGGSGGGGSGGGSLQITCPPPMSVEHADIWVKSYSLYSRERYICNSGFKRKAGTSSLTECVLNKATNVAHWTTPSLKCIRDPALVHQRPAPPSTVTTAGVTPQPESLSPSGKEPAASSPSSNNTAATTAAIVPGSQLMPSKSPSTGTTEISSHESSHGTPSQTTAKNWELTASASHQPPGVYPQGHSDTTVAISTSTVLLCGLSAVSLLACYLKSRQTPPLASVEMEAMEALPVTWGTSSRDEDLENCSHHLSGEETRELQSLAAAVVPSAQTLKITDFSFSDFELSDLETALCTIRMFTDLNLVQNFQMKHEVLCRWILSVKKNYRKNVAYHNWRHAFNTAQCMFAALKAGKIQNKLTDLEILALLIAALSHDLDHRGVNNSYIQRSEHPLAQLYCHSIMEHHHFDQCLMILNSPGNQILSGLSIEEYKTTLKIIKQAILATDLALYIKRLGEFAELIRKNQFNLEDPHQKELFLAMLMTACDLSAITKPWPIQQRIAELVATEFFDQGDRERKELNIEPTDLMNREKKNKIPSMQVGFIDAICLQLYEALTHVSEDCFPLLDGCRKNRQKWQALAEQQ

SEQ ID NO: 8335 - protein, 963 aa, Artificial Sequence
  source: /note="Description of Artificial Sequence: Synthetic Construct"
MDWTWILFLVAAATRVHSNWVNVISDLKKIEDLIQSMHIDATLYTESDVHPSCKVTAMKCFLLELQVISLESGDASIHDTVENLIILANNSLSSNGNVTESGCKECEELEEKNIKEFLQSFVHIVQMFINTSSGGGSGGGGSGGGGSGGGGSGGGSLQITCPPPMSVEHADIWVKSYSLYSRERYICNSGFKRKAGTSSLTECVLNKATNVAHWTTPSLKCIRDPALVHQRPAPPSTVTTAGVTPQPESLSPSGKEPAASSPSSNNTAATTAAIVPGSQLMPSKSPSTGTTEISSHESSHGTPSQTTAKNWELTASASHQPPGVYPQGHSDTTVAISTSTVLLCGLSAVSLLACYLKSRQTPPLASVEMEAMEALPVTWGTSSRDEDLENCSHHLSGVSKGAELFTGIVPILIELNGDVNGHKFSVSGEGEGDATYGKLTLKFICTTGKLPVPWPTLVTTLSYGVQCFSRYPDHMKQHDFFKSAMPEGYIQERTIFFEDDGNYKSRAEVKFEGDTLVNRIELTGTDFKEDGNILGNKMEYNYNAHNVYIMTDKAKNGIKVNFKIRHNIEDGSVQLADHYQQNTPIGDGPVLLPDNHYLSTQSALSKDPNEKRDHMIYFGFVTAAAITHGMDELYKSGEETRELQSLAAAVVPSAQTLKITDFSFSDFELSDLETALCTIRMFTDLNLVQNFQMKHEVLCRWILSVKKNYRKNVAYHNWRHAFNTAQCMFAALKAGKIQNKLTDLEILALLIAALSHDLDHRGVNNSYIQRSEHPLAQLYCHSIMEHHHFDQCLMILNSPGNQILSGLSIEEYKTTLKIIKQAILATDLALYIKRLGEFAELIRKNQFNLEDPHQKELFLAMLMTACDLSAITKPWPIQQRIAELVATEFFDQGDRERKELNIEPTDLMNREKKNKIPSMQVGFIDAICLQLYEALTHVSEDCFPLLDGCRKNRQKWQALAEQQ

SEQ ID NO: 8336 - protein, 963 aa, Artificial Sequence
  source: /note="Description of Artificial Sequence: Synthetic Construct"
MDWTWILFLVAAATRVHSNWVNVISDLKKIEDLIQSMHIDATLYTESDVHPSCKVTAMKCFLLELQVISLESGDASIHDTVENLIILANNSLSSNGNVTESGCKECEELEEKNIKEFLQSFVHIVQMFINTSSGGGSGGGGSGGGGSGGGGSGGGSLQITCPPPMSVEHADIWVKSYSLYSRERYICNSGFKRKAGTSSLTECVLNKATNVAHWTTPSLKCIRDPALVHQRPAPPSTVTTAGVTPQPESLSPSGKEPAASSPSSNNTAATTAAIVPGSQLMPSKSPSTGTTEISSHESSHGTPSQTTAKNWELTASASHQPPGVYPQGHSDTTVAISTSTVLLCGLSAVSLLACYLKSRQTPPLASVEMEAMEALPVTWGTSSRDEDLENCSHHLSGEETRELQSLAAAVVPSAQTLKITDFSFSDFELSDLETALCTIRMFTDLNLVQNFQMKHEVLCRWILSVKKNYRKNVAYHNWRHAFNTAQCMFAALKAGKIQNKLTDLEILALLIAALSHDLDHRGVNNSYIQRSEHPLAQLYCHSIMEHHHFDQCLMILNSPGNQILSGLSIEEYKTTLKIIKQAILATDLALYIKRLGEFAELIRKNQFNLEDPHQKELFLAMLMTACDLSAITKPWPIQQRIAELVATEFFDQGDRERKELNIEPTDLMNREKKNKIPSMQVGFIDAICLQLYEALTHVSEDCFPLLDGCRKNRQKWQALAEQQSGVSKGAELFTGIVPILIELNGDVNGHKFSVSGEGEGDATYGKLTLKFICTTGKLPVPWPTLVTTLSYGVQCFSRYPDHMKQHDFFKSAMPEGYIQERTIFFEDDGNYKSRAEVKFEGDTLVNRIELTGTDFKEDGNILGNKMEYNYNAHNVYIMTDKAKNGIKVNFKIRHNIEDGSVQLADHYQQNTPIGDGPVLLPDNHYLSTQSALSKDPNEKRDHMIYFGFVTAAAITHGMDELYK

SEQ ID NO: 8337 - protein, 735 aa, Artificial Sequence
  source: /note="Description of Artificial Sequence: Synthetic Construct"
MDWTWILFLVAAATRVHSNWVNVISDLKKIEDLIQSMHIDATLYTESDVHPSCKVTAMKCFLLELQVISLESGDASIHDTVENLIILANNSLSSNGNVTESGCKECEELEEKNIKEFLQSFVHIVQMFINTSSGGGSGGGGSGGGGSGGGGSGGGSLQITCPPPMSVEHADIWVKSYSLYSRERYICNSGFKRKAGTSSLTECVLNKATNVAHWTTPSLKCIRDPALVHQRPAPPSTVTTAGVTPQPESLSPSGKEPAASSPSSNNTAATTAAIVPGSQLMPSKSPSTGTTEISSHESSHGTPSQTTAKNWELTASASHQPPGVYPQGHSDTTVAISTSTVLLCGLSAVSLLACYLKSRQTPPLASVEMEAMEALPVTWGTSSRDEDLENCSHHLSGESRRVRRNKRSKEETRELQSLAAAVVPSAQTLKITDFSFSDFELSDLETALCTIRMFTDLNLVQNFQMKHEVLCRWILSVKKNYRKNVAYHNWRHAFNTAQCMFAALKAGKIQNKLTDLEILALLIAALSHDLDHRGVNNSYIQRSEHPLAQLYCHSIMEHHHFDQCLMILNSPGNQILSGLSIEEYKTTLKIIKQAILATDLALYIKRLGEFFELIRKNQFNLEDPHQKELFLAMLMTACDLSAITKPWPIQQRIAELVATEFFDQGDRERKELNIEPTDLMNREKKNKIPSMQVGFIDAICLQLYEALTHVSEDCFPLLDGCRKNRQKWQALAEQQ

SEQ ID NO: 8338 - protein, 723 aa, Artificial Sequence
  source: /note="Description of Artificial Sequence: Synthetic Construct"
MDWTWILFLVAAATRVHSNWVNVISDLKKIEDLIQSMHIDATLYTESDVHPSCKVTAMKCFLLELQVISLESGDASIHDTVENLIILANNSLSSNGNVTESGCKECEELEEKNIKEFLQSFVHIVQMFINTSSGGGSGGGGSGGGGSGGGGSGGGSLQITCPPPMSVEHADIWVKSYSLYSRERYICNSGFKRKAGTSSLTECVLNKATNVAHWTTPSLKCIRDPALVHQRPAPPSTVTTAGVTPQPESLSPSGKEPAASSPSSNNTAATTAAIVPGSQLMPSKSPSTGTTEISSHESSHGTPSQTTAKNWELTASASHQPPGVYPQGHSDTTVAISTSTVLLCGLSAVSLLACYLKSRQTPPLASVEMEAMEALPVTWGTSSRDEDLENCSHHLSGEETRELQSLAAAVVPSAQTLKITDFSFSDFELSDLETALCTIRMFTDLNLVQNFQMKHEVLCRWILSVKKNYRKNVAYHNWRHAFNTAQCMFAALKAGKIQNKLTDLEILALLIAALSHDLDHRGVNNSYIQRSEHPLAQLYCHSIMEHHHFDQCLMILNSPGNQILSGLSIEEYKTTLKIIKQAILATDLALYIKRLGEFFELIRKNQFNLEDPHQKELFLAMLMTACDLSAITKPWPIQQRIAELVATEFFDQGDRERKELNIEPTDLMNREKKNKIPSMQVGFIDAICLQLYEALTHVSEDCFPLLDGCRKNRQKWQALAEQQ

SEQ ID NO: 8339 - protein, 723 aa, Artificial Sequence
  source: /note="Description of Artificial Sequence: Synthetic Construct"
MDWTWILFLVAAATRVHSNWVNVISDLKKIEDLIQSMHIDATLYTESDVHPSCKVTAMKCFLLELQVISLESGDASIHDTVENLIILANNSLSSNGNVTESGCKECEELEEKNIKEFLQSFVHIVQMFINTSSGGGSGGGGSGGGGSGGGGSGGGSLQITCPPPMSVEHADIWVKSYSLYSRERYICNSGFKRKAGTSSLTECVLNKATNVAHWTTPSLKCIRDPALVHQRPAPPSTVTTAGVTPQPESLSPSGKEPAASSPSSNNTAATTAAIVPGSQLMPSKSPSTGTTEISSHESSHGTPSQTTAKNWELTASASHQPPGVYPQGHSDTTVAISTSTVLLCGLSAVSLLACYLKSRQTPPLASVEMEAMEALPVTWGTSSRDEDLENCSHHLSGEETRELQSLAAAVVPSAQTLKITDFSFSDFELSDLETALCTIRMFTDLNLVQNFQMKHEVLCRWILSVKKNYRKNVAYHNWRHAFNTAQCMFAALKAGKIQNKLTDLEILALLIAALSHDLDHRGVNNSYIQRSEHPLAQLYCHSIMEHHHFDQCLMILNSPGNQILSGLSIEEYKTTLKIIKQAILATDLALYIKRRGEFFELIRKNQFNLEDPHQKELFLAMLMTACDLSAITKPWPIQQRIAELVATEFFDQGDRERKELNIEPTDLMNREKKNKIPSMQVGFIDAICLQLYEALTHVSEDCFPLLDGCRKNRQKWQALAEQQ

SEQ ID NO: 8340 - protein, 723 aa, Artificial Sequence; identical to SEQ ID NO: 8339
  source: /note="Description of Artificial Sequence: Synthetic Construct"

SEQ ID NO: 8341 - protein, 744 aa, Artificial Sequence
  source: /note="Description of Artificial Sequence: Synthetic Construct"
MDWTWILFLVAAATRVHSDYKDDDDKNWVNVISDLKKIEDLIQSMHIDATLYTESDVHPSCKVTAMKCFLLELQVISLESGDASIHDTVENLIILANNSLSSNGNVTESGCKECEELEEKNIKEFLQSFVHIVQMFINTSSGGGSGGGGSGGGGSGGGGSGGGSLQYPYDVPDYAITCPPPMSVEHADIWVKSYSLYSRERYICNSGFKRKAGTSSLTECVLNKATNVAHWTTPSLKCIRDPALVHQRPAPPSTVTTAGVTPQPESLSPSGKEPAASSPSSNNTAATTAAIVPGSQLMPSKSPSTGTTEISSHESSHGTPSQTTAKNWELTASASHQPPGVYPQGHSDTTVAISTSTVLLCGLSAVSLLACYLKSRQTPPLASVEMEAMEALPVTWGTSSRDEDLENCSHHLGSGSGSEETRELQSLAAAVVPSAQTLKITDFSFSDFELSDLETALCTIRMFTDLNLVQNFQMKHEVLCRWILSVKKNYRKNVAYHNWRHAFNTAQCMFAALKAGKIQNKLTDLEILALLIAALSHDLDHRGVNNSYIQRSEHPLAQLYCHSIMEHHHFDQCLMILNSPGNQILSGLSIEEYKTTLKIIKQAILATDLALYIKRLGEFFELIRKNQFNLEDPHQKELFLAMLMTACDLSAITKPWPIQQRIAELVATEFFDQGDRERKELNIEPTDLMNREKKNKIPSMQVGFIDAICLQLYEALTHVSEDCFPLLDGCRKNRQKWQALAEQQ

SEQ ID NO: 8342 - protein, 746 aa, Artificial Sequence
  source: /note="Description of Artificial Sequence: Synthetic Construct"
MDWTWILFLVAAATRVHSDYKDDDDKNWVNVISDLKKIEDLIQSMHIDATLYTESDVHPSCKVTAMKCFLLELQVISLESGDASIHDTVENLIILANNSLSSNGNVTESGCKECEELEEKNIKEFLQSFVHIVQMFINTSSGGGSGGGGSGGGGSGGGGSGGGSLQYPYDVPDYAITCPPPMSVEHADIWVKSYSLYSRERYICNSGFKRKAGTSSLTECVLNKATNVAHWTTPSLKCIRDPALVHQRPAPPSTVTTAGVTPQPESLSPSGKEPAASSPSSNNTAATTAAIVPGSQLMPSKSPSTGTTEISSHESSHGTPSQTTAKNWELTASASHQPPGVYPQGHSDTTVAISTSTVLLCGLSAVSLLACYLKSRQTPPLASVEMEAMEALPVTWGTSSRDEDLENCSHHLGSGSGSGSEETRELQSLAAAVVPSAQTLKITDFSFSDFELSDLETALCTIRMFTDLNLVQNFQMKHEVLCRWILSVKKNYRKNVAYHNWRHAFNTAQCMFAALKAGKIQNKLTDLEILALLIAALSHDLDHRGVNNSYIQRSEHPLAQLYCHSIMEHHHFDQCLMILNSPGNQILSGLSIEEYKTTLKIIKQAILATDLALYIKRLGEFFELIRKNQFNLEDPHQKELFLAMLMTACDLSAITKPWPIQQRIAELVATEFFDQGDRERKELNIEPTDLMNREKKNKIPSMQVGFIDAICLQLYEALTHVSEDCFPLLDGCRKNRQKWQALAEQQ

SEQ ID NO: 8343 - protein, 748 aa, Artificial Sequence
  source: /note="Description of Artificial Sequence: Synthetic Construct"
MDWTWILFLVAAATRVHSDYKDDDDKNWVNVISDLKKIEDLIQSMHIDATLYTESDVHPSCKVTAMKCFLLELQVISLESGDASIHDTVENLIILANNSLSSNGNVTESGCKECEELEEKNIKEFLQSFVHIVQMFINTSSGGGSGGGGSGGGGSGGGGSGGGSLQYPYDVPDYAITCPPPMSVEHADIWVKSYSLYSRERYICNSGFKRKAGTSSLTECVLNKATNVAHWTTPSLKCIRDPALVHQRPAPPSTVTTAGVTPQPESLSPSGKEPAASSPSSNNTAATTAAIVPGSQLMPSKSPSTGTTEISSHESSHGTPSQTTAKNWELTASASHQPPGVYPQGHSDTTVAISTSTVLLCGLSAVSLLACYLKSRQTPPLASVEMEAMEALPVTWGTSSRDEDLENCSHHLGSGSGGGSGSEETRELQSLAAAVVPSAQTLKITDFSFSDFELSDLETALCTIRMFTDLNLVQNFQMKHEVLCRWILSVKKNYRKNVAYHNWRHAFNTAQCMFAALKAGKIQNKLTDLEILALLIAALSHDLDHRGVNNSYIQRSEHPLAQLYCHSIMEHHHFDQCLMILNSPGNQILSGLSIEEYKTTLKIIKQAILATDLALYIKRLGEFFELIRKNQFNLEDPHQKELFLAMLMTACDLSAITKPWPIQQRIAELVATEFFDQGDRERKELNIEPTDLMNREKKNKIPSMQVGFIDAICLQLYEALTHVSEDCFPLLDGCRKNRQKWQALAEQQ

SEQ ID NO: 8344 - DNA, 342 bp, Artificial Sequence
  source: /note="Description of Artificial Sequence: Synthetic Payload sequence"
aactgggtgaatgtaataagtgatttgaaaaaaattgaagatcttattcaatctatgcatattgatgctactttatatacggaaagtgatgttcaccccagttgcaaagtaacagcaatgaagtgctttctcttggagttacaagttatttcacttgagtccggagatgcaagtattcatgatacagtagaaaatctgatcatcctagcaaacaacagtttgtcttctaatgggaatgtaacagaatctggatgcaaagaatgtgaggaactggaggaaaaaaatattaaagaatttttgcagagttttgtacatattgtccaaatgttcatcaacacttct

SEQ ID NO: 8345 - DNA, 714 bp, Homo sapiens Payload
atcacgtgccctccccccatgtccgtggaacacgcagacatctgggtcaagagctacagcttgtactccagggagcggtacatttgtaactctggtttcaagcgtaaagccggcacgtccagcctgacggagtgcgtgttgaacaaggccacgaatgtcgcccactggacaacccccagtctcaaatgcattagagaccctgccctggttcaccaaaggccagcgccaccctccacagtaacgacggcaggggtgaccccacagccagagagcctctccccttctggaaaagagcccgcagcttcatctcccagctcaaacaacacagcggccacaacagcagctattgtcccgggctcccagctgatgccttcaaaatcaccttccacaggaaccacagagataagcagtcatgagtcctcccacggcaccccctctcagacaacagccaagaactgggaactcacagcatccgcctcccaccagccgccaggtgtgtatccacagggccacagcgacaccactgtggctatctccacgtccactgtcctgctgtgtgggctgagcgctgtgtctctcctggcatgctacctcaagtcaaggcaaactcccccgctggccagcgttgaaatggaagccatggaggctctgccggtgacttgggggaccagcagcagagatgaagacttggaaaactgctctcaccacctatga

SEQ ID NO: 8346 - DNA, 711 bp, Artificial Sequence
  source: /note="Description of Artificial Sequence: Synthetic Payload sequence"
attacctgcccccctccgatgagcgtggagcacgccgacatctgggtcaagagctacagcttgtatagtagggagcggtacatctgtaacagcgggttcaagaggaaggccgggaccagctcactgaccgagtgcgtgttgaacaaggccaccaacgtggcccactggaccacccctagccttaagtgcatcagggacccagcgctcgtacaccagagacccgcgcctccctctacggtaaccacggcaggcgtaaccccccagcccgagagcctgtccccgagcggcaaggagcctgcagcgagcagcccctcaagcaacaacacagccgctaccaccgcggcaatcgtgcccggcagccagctgatgccctcaaagagccccagcaccggcaccactgagataagcagccacgagagctcacacggcactccctcacagaccactgccaagaattgggagctgaccgcctctgccagccaccagcccccaggcgtgtatccccagggccacagcgacaccacggtcgccatcagcacatctacagtgcttttgtgcggccttagcgccgtgtcactgctggcatgctacttgaaaagtaggcaaactccccctcttgccagtgtggaaatggaggccatggaagccctgcccgtgacctggggcaccagttctagggacgaggaccttgagaactgctcacatcatttg

SEQ ID NO: 8347 - DNA, 18 bp, Artificial Sequence
  source: /note="Description of Artificial Sequence: Synthetic Linker"
ggatcaggttccggatcc

SEQ ID NO: 8348 - DNA, 24 bp, Artificial Sequence
  source: /note="Description of Artificial Sequence: Synthetic Linker"
ggatctggttccggatcaggatcc

SEQ ID NO: 8349 - DNA, 30 bp, Artificial Sequence
  source: /note="Description of Artificial Sequence: Synthetic Linker"
ggatcaggttccggaggtggatctggatcc

SEQ ID NO: 8350 - DNA, 24 bp, Artificial Sequence
  source: /note="Description of Artificial Sequence: Synthetic Tag"
gactacaaagacgatgacgacaag

SEQ ID NO: 8351 - DNA, 27 bp, Artificial Sequence
  source: /note="Description of Artificial Sequence: Synthetic Tag"
tacccatacgatgttccagattacgct

SEQ ID NO: 8352 - DNA, 2172 bp, Artificial Sequence
  source: /note="Description of Artificial Sequence: Synthetic Construct"
atggactggacatggatactcttcctggtagcagccgccacacgagtgcacagcaactgggtgaacgtgatctccgacctgaaaaagatcgaggatttgatccagagcatgcacattgacgccaccctgtataccgagtccgacgtgcacccgagttgcaaggtgactgccatgaagtgcttcctgctggagctgcaagtgatcagcctggagagcggcgacgccagcatccacgacaccgtggaaaaccttatcattctggccaacaatagcctgagcagcaacggcaacgtgaccgaaagcggatgtaaggaatgcgaggaactggaagagaagaatatcaaagaattcctgcaaagcttcgtgcacatcgtgcagatgttcatcaacacttcttcaggtggcggtagtggtgggggaggatctggaggcggaggaagcgggggtggaggttcaggaggagggagcttgcaaattacctgcccccctccgatgagcgtggagcacgccgacatctgggtcaagagctacagcttgtatagtagggagcggtacatctgtaacagcgggttcaagaggaaggccgggaccagctcactgaccgagtgcgtgttgaacaaggccaccaacgtggcccactggaccacccctagccttaagtgcatcagggacccagcgctcgtacaccagagacccgcgcctccctctacggtaaccacggcaggcgtaaccccccagcccgagagcctgtccccgagcggcaaggagcctgcagcgagcagcccctcaagcaacaacacagccgctaccaccgcggcaatcgtgcccggcagccagctgatgccctcaaagagccccagcaccggcaccactgagataagcagccacgagagctcacacggcactccctcacagaccactgccaagaattgggagctgaccgcctctgccagccaccagcccccaggcgtgtatccccagggccacagcgacaccacggtcgccatcagcacatctacagtgcttttgtgcggccttagcgccgtgtcactgctggcatgctacttgaaaagtaggcaaactccccctcttgccagtgtggaaatggaggccatggaagccctgcccgtgacctggggcaccagttctagggacgaggaccttgagaactgctcacatcatttgagtggtgaagaaacaagagagctacagtcgttagcggctgctgtggtgccatctgcccagacccttaaaattactgactttagcttcagtgactttgagctgtctgatctggaaacagcactgtgtacaattcggatgtttactgacctcaaccttgtgcagaacttccagatgaaacatgaggttctttgcagatggattttaagtgttaagaagaattatcggaagaatgttgcctatcataattggagacatgcctttaatacagctcagtgcatgtttgctgctctaaaagcaggcaaaattcagaacaagctgactgacctggagatacttgcattgctgattgctgcactaagccacgatttggatcaccgtggtgtgaataactcttacatacagcgaagtgaacatccacttgcccagctttactgccattcaatcatggaacaccatcattttgaccagtgcctgatgattcttaatagtccaggcaatcagattctcagtggcctctccattgaagaatataagaccacgttgaaaataatcaagcaagctattttagctacagacctagcactgtacattaagaggctaggagaatttgctgaacttataagaaaaaatcaattcaatttggaagatcctcatcaaaaggagttgtttttggcaatgctgatgacagcttgtgatctttctgcaattacaaaaccctggcctattcaacaacggatagcagaacttgtagcaactgaattttttgatcaaggagacagagagagaaaagaactcaacatagaacccactgatctaatgaacagggagaagaaaaacaaaatcccaagtatgcaagttgggttcatagatgccatctgcttgcaactgtatgaggccctgacccacgtgtcagaggactgtttccctttgctagatggctgcagaaagaacaggcagaaatggcaggcccttgcagaacagcagtga

SEQ ID NO: 8353 - DNA, 2892 bp, Artificial Sequence
  source: /note="Description of Artificial Sequence: Synthetic Construct"
atggactggacatggatactcttcctggtagcagccgccacacgagtgcacagcaactgggtgaacgtgatctccgacctgaaaaagatcgaggatttgatccagagcatgcacattgacgccaccctgtataccgagtccgacgtgcacccgagttgcaaggtgactgccatgaagtgcttcctgctggagctgcaagtgatcagcctggagagcggcgacgccagcatccacgacaccgtggaaaaccttatcattctggccaacaatagcctgagcagcaacggcaacgtgaccgaaagcggatgtaaggaatgcgaggaactggaagagaagaatatcaaagaattcctgcaaagcttcgtgcacatcgtgcagatgttcatcaacacttcttcaggtggcggtagtggtgggggaggatctggaggcggaggaagcgggggtggaggttcaggaggagggagcttgcaaattacctgcccccctccgatgagcgtggagcacgccgacatctgggtcaagagctacagcttgtatagtagggagcggtacatctgtaacagcgggttcaagaggaaggccgggaccagctcactgaccgagtgcgtgttgaacaaggccaccaacgtggcccactggaccacccctagccttaagtgcatcagggacccagcgctcgtacaccagagacccgcgcctccctctacggtaaccacggcaggcgtaaccccccagcccgagagcctgtccccgagcggcaaggagcctgcagcgagcagcccctcaagcaacaacacagccgctaccaccgcggcaatcgtgcccggcagccagctgatgccctcaaagagccccagcaccggcaccactgagataagcagccacgagagctcacacggcactccctcacagaccactgccaagaattgggagctgaccgcctctgccagccaccagcccccaggcgtgtatccccagggccacagcgacaccacggtcgccatcagcacatctacagtgcttttgtgcggccttagcgccgtgtcactgctggcatgctacttgaaaagtaggcaaactccccctcttgccagtgtggaaatggaggccatggaagccctgcccgtgacctggggcaccagttctagggacgaggaccttgagaactgctcacatcatttgagtggtgtgagcaagggcgccgagctgttcaccggcatcgtgcccatcctgatcgagctgaatggcgatgtgaatggccacaagttcagcgtgagcggcgagggcgagggcgatgccacctacggcaagctgaccctgaagttcatctgcaccaccggcaagctgcctgtgccctggcccaccctggtgaccaccctgagctacggcgtgcagtgcttctcacgctaccccgatcacatgaagcagcacgacttcttcaagagcgccatgcctgagggctacatccaggagcgcaccatcttcttcgaggatgacggcaactacaagtcgcgcgccgaggtgaagttcgagggcgataccctggtgaatcgcatcgagctgaccggcaccgatttcaaggaggatggcaacatcctgggcaataagatggagtacaactacaacgcccacaatgtgtacatcatgaccgacaaggccaagaatggcatcaaggtgaacttcaagatccgccacaacatcgaggatggcagcgtgcagctggccgaccactaccagcagaatacccccatcggcgatggccctgtgctgctgcccgataaccactacctgtccacccagagcgccctgtccaaggaccccaacgagaagcgcgatcacatgatctacttcggcttcgtgaccgccgccgccatcacccacggcatggatgagctgtacaagagtggtgaagaaacaagagagctacagtcgttagcggctgctgtggtgccatctgcccagacccttaaaattactgactttagcttcagtgactttgagctgtctgatctggaaacagcactgtgtacaattcggatgtttactgacctcaaccttgtgcagaacttccagatgaaacatgaggttctttgcagatggattttaagtgttaagaagaattatcggaagaatgttgcctatcataattggagacatgcctttaatacagctcagtgcatgtttgctgctctaaaagcaggcaaaattcagaacaagctgactgacctggagatacttgcattgctgattgctgcactaagccacgatttggatcaccgtggtgtgaataactcttacatacagcgaagtgaacatccacttgcccagctttactgccattcaatcatggaacaccatcattttgaccagtgcctgatgattcttaatagtccaggcaatcagattctcagtggcctctccattgaagaatataagaccacgttgaaaataatcaagcaagctattttagctacagacctagcactgtacattaagaggctaggagaatttgctgaacttataagaaaaaatcaattcaatttggaagatcctcatcaaaaggagttgtttttggcaatgctgatgacagcttgtgatctttctgcaattacaaaaccctggcctattcaacaacggatagcagaacttgtagcaactgaattttttgatcaaggagacagagagagaaaagaactcaacatagaacccactgatctaatgaacagggagaagaaaaacaaaatcccaagtatgcaagttgggttcatagatgccatctgcttgcaactgtatgaggccctgacccacgtgtcagaggactgtttccctttgctagatggctgcagaaagaacaggcagaaatggcaggcccttgcagaacagcagtga

SEQ ID NO: 8354 - DNA, 2892 bp, Artificial Sequence
  source: /note="Description of Artificial Sequence: Synthetic Construct"
atggactggacatggatactcttcctggtagcagccgccacacgagtgcacagcaactgggtgaacgtgatctccgacctgaaaaagatcgaggatttgatccagagcatgcacattgacgccaccctgtataccgagtccgacgtgcacccgagttgcaaggtgactgccatgaagtgcttcctgctggagctgcaagtgatcagcctggagagcggcgacgccagcatccacgacaccgtggaaaaccttatcattctggccaacaatagcctgagcagcaacggcaacgtgaccgaaagcggatgtaaggaatgcgaggaactggaagagaagaatatcaaagaattcctgcaaagcttcgtgcacatcgtgcagatgttcatcaacacttcttcaggtggcggtagtggtgggggaggatctggaggcggaggaagcgggggtggaggttcaggaggagggagcttgcaaattacctgcccccctccgatgagcgtggagcacgccgacatctgggtcaagagctacagcttgtatagtagggagcggtacatctgtaacagcgggttcaagaggaaggccgggaccagctcactgaccgagtgcgtgttgaacaaggccaccaacgtggcccactggaccacccctagccttaagtgcatcagggacccagcgctcgtacaccagagacccgcgcctccctctacggtaaccacggcaggcgtaaccccccagcccgagagcctgtccccgagcggcaaggagcctgcagcgagcagcccctcaagcaacaacacagccgctaccaccgcggcaatcgtgcccggcagccagctgatgccctcaaagagccccagcaccggcaccactgagataagcagccacgagagctcacacggcactccctcacagaccactgccaagaattgggagctgaccgcctctgccagccaccagcccccaggcgtgtatccccagggccacagcgacaccacggtcgccatcagcacatctacagtgcttttgtgcggccttagcgccgtgtcactgctggcatgctacttgaaaagtaggcaaactccccctcttgccagtgtggaaatggaggccatggaagccctgcccgtgacctggggcaccagttctagggacgaggaccttgagaactgctcacatcatttgagtggtgaagaaacaagagagctacagtcgttagcggctgctgtggtgccatctgcccagacccttaaaattactgactttagcttcagtgactttgagctgtctgatctggaaacagcactgtgtacaattcggatgtttactgacctcaaccttgtgcagaacttccagatgaaacatgaggttctttgcagatggattttaagtgttaagaagaattatcggaagaatgttgcctatcataattggagacatgcctttaatacagctcagtgcatgtttgctgctctaaaagcaggcaaaattcagaacaagctgactgacctggagatacttgcattgctgattgctgcactaagccacgatttggatcaccgtggtgtgaataactcttacatacagcgaagtgaacatccacttgcccagctttactgccattcaatcatggaacaccatcattttgaccagtgcctgatgattcttaatagtccaggcaatcagattctcagtggcctctccattgaagaatataagaccacgttgaaaataatcaagcaagctattttagctacagacctagcactgtacattaagaggctaggagaatttgctgaacttataagaaaaaatcaattcaatttggaagatcctcatcaaaaggagttgtttttggcaatgctgatgacagcttgtgatctttctgcaattacaaaaccctggcctattcaacaacggatagcagaacttgtagcaactgaattttttgatcaaggagacagagagagaaaagaactcaacatagaacccactgatctaatgaacagggagaagaaaaacaaaatcccaagtatgcaagttgggttcatagatgccatctgcttgcaactgtatgaggccctgacccacgtgtcagaggactgtttccctttgctagatggctgcagaaagaacaggcagaaatggcaggcccttgcagaacagcagagtggtgtgagcaagggcgccgagctgttcaccggcatcgtgcccatcctgatcgagctgaatggcgatgtgaatggccacaagttcagcgtgagcggcgagggcgagggcgatgccacctacggcaagctgaccctgaagttcatctgcaccaccggcaagctgcctgtgccctggcccaccctggtgaccaccctgagctacggcgtgcagtgcttctcacgctaccccgatcacatgaagcagcacgacttcttcaagagcgccatgcctgagggctacatccaggagcgcaccatcttcttcgaggatgacggcaactacaagtcgcgcgccgaggtgaagttcgagggcgataccctggtgaatcgcatcgagctgaccggcaccgatttcaaggaggatggcaacatcctgggcaataagatggagtacaactacaacgcccacaatgtgtacatcatgaccgacaaggccaagaatggcatcaaggtgaacttcaagatccgccacaacatcgaggatggcagcgtgcagctggccgaccactaccagcagaatacccccatcggcgatggccctgtgctgctgcccgataaccactacctgtccacccagagcgccctgtccaaggaccccaacgagaagcgcgatcacatgatctacttcggcttcgtgaccgccgccgccatcacccacggcatggatgagctgtacaagtga

SEQ ID NO: 8355 - DNA, 2208 bp, Artificial Sequence
  source: /note="Description of Artificial Sequence: Synthetic Construct"
atggactggacatggatactcttcctggtagcagccgccacacgagtgcacagcaactgggtgaacgtgatctccgacctgaaaaagatcgaggatttgatccagagcatgcacattgacgccaccctgtataccgagtccgacgtgcacccgagttgcaaggtgactgccatgaagtgcttcctgctggagctgcaagtgatcagcctggagagcggcgacgccagcatccacgacaccgtggaaaaccttatcattctggccaacaatagcctgagcagcaacggcaacgtgaccgaaagcggatgtaaggaatgcgaggaactggaagagaagaatatcaaagaattcctgcaaagcttcgtgcacatcgtgcagatgttcatcaacacttcttcaggtggcggtagtggtgggggaggatctggaggcggaggaagcgggggtggaggttcaggaggagggagcttgcaaattacctgcccccctccgatgagcgtggagcacgccgacatctgggtcaagagctacagcttgtatagtagggagcggtacatctgtaacagcgggttcaagaggaaggccgggaccagctcactgaccgagtgcgtgttgaacaaggccaccaacgtggcccactggaccacccctagccttaagtgcatcagggacccagcgctcgtacaccagagacccgcgcctccctctacggtaaccacggcaggcgtaaccccccagcccgagagcctgtccccgagcggcaaggagcctgcagcgagcagcccctcaagcaacaacacagccgctaccaccgcggcaatcgtgcccggcagccagctgatgccctcaaagagccccagcaccggcaccactgagataagcagccacgagagctcacacggcactccctcacagaccactgccaagaattgggagctgaccgcctctgccagccaccagcccccaggcgtgtatccccagggccacagcgacaccacggtcgccatcagcacatctacagtgcttttgtgcggccttagcgccgtgtcactgctggcatgctacttgaaaagtaggcaaactccccctcttgccagtgtggaaatggaggccatggaagccctgcccgtgacctggggcaccagttctagggacgaggaccttgagaactgctcacatcatttgagtggtgagtccaggagagtgcggcgcaacaagaggagcaaggaagaaacaagagagctacagtcgttagcggctgctgtggtgccatctgcccagacccttaaaattactgactttagcttcagtgactttgagctgtctgatctggaaacagcactgtgtacaattcggatgtttactgacctcaaccttgtgcagaacttccagatgaaacatgaggttctttgcagatggattttaagtgttaagaagaattatcggaagaatgttgcctatcataattggagacatgcctttaatacagctcagtgcatgtttgctgctctaaaagcaggcaaaattcagaacaagctgactgacctggagatacttgcattgctgattgctgcactaagccacgatttggatcaccgtggtgtgaataactcttacatacagcgaagtgaacatccacttgcccagctttactgccattcaatcatggaacaccatcattttgaccagtgcctgatgattcttaatagtccaggcaatcagattctcagtggcctctccattgaagaatataagaccacgttgaaaataatcaagcaagctattttagctacagacctagcactgtacattaagaggctaggagaattttttgaacttataagaaaaaatcaattcaatttggaagatcctcatcaaaaggagttgtttttggcaatgctgatgacagcttgtgatctttctgcaattacaaaaccctggcctattcaacaacggatagcagaacttgtagcaactgaattttttgatcaaggagacagagagagaaaagaactcaacatagaacccactgatctaatgaacagggagaagaaaaacaaaatcccaagtatgcaagttgggttcatagatgccatctgcttgcaactgtatgaggccctgacccacgtgtcagaggactgtttccctttgctagatggctgcagaaagaacaggcagaaatggcaggcccttgcagaacagcagtga

SEQ ID NO: 8356 - DNA, 2172 bp, Artificial Sequence
  source: /note="Description of Artificial Sequence: Synthetic Construct"
atggactggacatggatactcttcctggtagcagccgccacacgagtgcacagcaactgggtgaacgtgatctccgacctgaaaaagatcgaggatttgatccagagcatgcacattgacgccaccctgtataccgagtccgacgtgcacccgagttgcaaggtgactgccatgaagtgcttcctgctggagctgcaagtgatcagcctggagagcggcgacgccagcatccacgacaccgtggaaaaccttatcattctggccaacaatagcctgagcagcaacggcaacgtgaccgaaagcggatgtaaggaatgcgaggaactggaagagaagaatatcaaagaattcctgcaaagcttcgtgcacatcgtgcagatgttcatcaacacttcttcaggtggcggtagtggtgggggaggatctggaggcggaggaagcgggggtggaggttcaggaggagggagcttgcaaattacctgcccccctccgatgagcgtggagcacgccgacatctgggtcaagagctacagcttgtatagtagggagcggtacatctgtaacagcgggttcaagaggaaggccgggaccagctcactgaccgagtgcgtgttgaacaaggccaccaacgtggcccactggaccacccctagccttaagtgcatcagggacccagcgctcgtacaccagagacccgcgcctccctctacggtaaccacggcaggcgtaaccccccagcccgagagcctgtccccgagcggcaaggagcctgcagcgagcagcccctcaagcaacaacacagccgctaccaccgcggcaatcgtgcccggcagccagctgatgccctcaaagagccccagcaccggcaccactgagataagcagccacgagagctcacacggcactccctcacagaccactgccaagaattgggagctgaccgcctctgccagccaccagcccccaggcgtgtatccccagggccacagcgacaccacggtcgccatcagcacatctacagtgcttttgtgcggccttagcgccgtgtcactgctggcatgctacttgaaaagtaggcaaactccccctcttgccagtgtggaaatggaggccatggaagccctgcccgtgacctggggcaccagttctagggacgaggaccttgagaactgctcacatcatttgagtggtgaagaaacaagagagctacagtcgttagcggctgctgtggtgccatctgcccagacccttaaaattactgactttagcttcagtgactttgagctgtctgatctggaaacagcactgtgtacaattcggatgtttactgacctcaaccttgtgcagaacttccagatgaaacatgaggttctttgcagatggattttaagtgttaagaagaattatcggaagaatgttgcctatcataattggagacatgcctttaatacagctcagtgcatgtttgctgctctaaaagcaggcaaaattcagaacaagctgactgacctggagatacttgcattgctgattgctgcactaagccacgatttggatcaccgtggtgtgaataactcttacatacagcgaagtgaacatccacttgcccagctttactgccattcaatcatggaacaccatcattttgaccagtgcctgatgattcttaatagtccaggcaatcagattctcagtggcctctccattgaagaatataagaccacgttgaaaataatcaagcaagctattttagctacagacctagcactgtacattaagaggctaggagaattttttgaacttataagaaaaaatcaattcaatttggaagatcctcatcaaaaggagttgtttttggcaatgctgatgacagcttgtgatctttctgcaattacaaaaccctggcctattcaacaacggatagcagaacttgtagcaactgaattttttgatcaaggagacagagagagaaaagaactcaacatagaacccactgatctaatgaacagggagaagaaaaacaaaatcccaagtatgcaagttgggttcatagatgccatctgcttgcaactgtatgaggccctgacccacgtgtcagaggactgtttccctttgctagatggctgcagaaagaacaggcagaaatggcaggcccttgcagaacagcagtga

SEQ ID NO: 8357 - DNA, 2172 bp, Artificial Sequence
  source: /note="Description of Artificial Sequence: Synthetic Construct"
atggactggacatggatactcttcctggtagcagccgccacacgagtgcacagcaactgggtgaacgtgatctccgacctgaaaaagatcgaggatttgatccagagcatgcacattgacgccaccctgtataccgagtccgacgtgcacccgagttgcaaggtgactgccatgaagtgcttcctgctggagctgcaagtgatcagcctggagagcggcgacgccagcatccacgacaccgtggaaaaccttatcattctggccaacaatagcctgagcagcaacggcaacgtgaccgaaagcggatgtaaggaatgcgaggaactggaagagaagaatatcaaagaattcctgcaaagcttcgtgcacatcgtgcagatgttcatcaacacttcttcaggtggcggtagtggtgggggaggatctggaggcggaggaagcgggggtggaggttcaggaggagggagcttgcaaattacctgcccccctccgatgagcgtggagcacgccgacatctgggtcaagagctacagcttgtatagtagggagcggtacatctgtaacagcgggttcaagaggaaggccgggaccagctcactgaccgagtgcgtgttgaacaaggccaccaacgtggcccactggaccacccctagccttaagtgcatcagggacccagcgctcgtacaccagagacccgcgcctccctctacggtaaccacggcaggcgtaaccccccagcccgagagcctgtccccgagcggcaaggagcctgcagcgagcagcccctcaagcaacaacacagccgctaccaccgcggcaatcgtgcccggcagccagctgatgccctcaaagagccccagcaccggcaccactgagataagcagccacgagagctcacacggcactccctcacagaccactgccaagaattgggagctgaccgcctctgccagccaccagcccccaggcgtgtatccccagggccacagcgacaccacggtcgccatcagcacatctacagtgcttttgtgcggccttagcgccgtgtcactgctggcatgctacttgaaaagtaggcaaactccccctcttgccagtgtggaaatggaggccatggaagccctgcccgtgacctggggcaccagttctagggacgaggaccttgagaactgctcacatcatttgagtggtgaagaaacaagagagctacagtcgttagcggctgctgtggtgccatctgcccagacccttaaaattactgactttagcttcagtgactttgagctgtctgatctggaaacagcactgtgtacaattcggatgtttactgacctcaaccttgtgcagaacttccagatgaaacatgaggttctttgcagatggattttaagtgttaagaagaattatcggaagaatgttgcctatcataattggagacatgcctttaatacagctcagtgcatgtttgctgctctaaaagcaggcaaaattcagaacaagctgactgacctggagatacttgcattgctgattgctgcactaagccacgatttggatcaccgtggtgtgaataactcttacatacagcgaagtgaacatccacttgcccagctttactgccattcaatcatggaacaccatcattttgaccagtgcctgatgattcttaatagtccaggcaatcagattctcagtggcctctccattgaagaatataagaccacgttgaaaataatcaagcaagctattttagctacagacctagcactgtacattaagaggcgaggagaattttttgaacttataagaaaaaatcaattcaatttggaagatcctcatcaaaaggagttgtttttggcaatgctgatgacagcttgtgatctttctgcaattacaaaaccctggcctattcaacaacggatagcagaacttgtagcaactgaattttttgatcaaggagacagagagagaaaagaactcaacatagaacccactgatctaatgaacagggagaagaaaaacaaaatcccaagtatgcaagttgggttcatagatgccatctgcttgcaactgtatgaggccctgacccacgtgtcagaggactgtttccctttgctagatggctgcagaaagaacaggcagaaatggcaggcccttgcagaacagcagtga

SEQ ID NO: 8358 - DNA, 2172 bp, Artificial Sequence
  source: /note="Description of Artificial Sequence: Synthetic Construct"
atggactggacatggatactcttcctggtagcagccgccacacgagtgcacagcaactgggtgaatgtaataagtgatttgaaaaaaattgaagatcttattcaatctatgcatattgatgctactttatatacggaaagtgatgttcaccccagttgcaaagtaacagcaatgaagtgctttctcttggagttacaagttatttcacttgagtccggagatgcaagtattcatgatacagtagaaaatctgatcatcctagcaaacaacagtttgtcttctaatgggaatgtaacagaatctggatgcaaagaatgtgaggaactggaggaaaaaaatattaaagaatttttgcagagttttgtacatattgtccaaatgttcatcaacacttcttcaggtggcggtagtggtgggggaggatctggaggcggaggaagcgggggtggaggttcaggaggagggagcttgcaaattacctgcccccctccgatgagcgtggagcacgccgacatctgggtcaagagctacagcttgtatagtagggagcggtacatctgtaacagcgggttcaagaggaaggccgggaccagctcactgaccgagtgcgtgttgaacaaggccaccaacgtggcccactggaccacccctagccttaagtgcatcagggacccagcgctcgtacaccagagacccgcgcctccctctacggtaaccacggcaggcgtaaccccccagcccgagagcctgtccccgagcggcaaggagcctgcagcgagcagcccctcaagcaacaacacagccgctaccaccgcggcaatcgtgcccggcagccagctgatgccctcaaagagccccagcaccggcaccactgagataagcagccacgagagctcacacggcactccctcacagaccactgccaagaattgggagctgaccgcctctgccagccaccagcccccaggcgtgtatccccagggccacagcgacaccacggtcgccatcagcacatctacagtgcttttgtgcggccttagcgccgtgtcactgctggcatgctacttgaaaagtaggcaaactccccctcttgccagtgtggaaatggaggccatggaagccctgcccgtgacctggggcaccagttctagggacgaggaccttgagaactgctcacatcatttgagtggtgaagaaacaagagagctacagtcgttagcggctgctgtggtgccatctgcccagacccttaaaattactgactttagcttcagtgactttgagctgtctgatctggaaacagcactgtgtacaattcggatgtttactgacctcaaccttgtgcagaacttccagatgaaacatgaggttctttgcagatggattttaagtgttaagaagaattatcggaagaatgttgcctatcataattggagacatgcctttaatacagctcagtgcatgtttgctgctctaaaagcaggcaaaattcagaacaagctgactgacctggagatacttgcattgctgattgctgcactaagccacgatttggatcaccgtggtgtgaataactcttacatacagcgaagtgaacatccacttgcccagctttactgccattcaatcatggaacaccatcattttgaccagtgcctgatgattcttaatagtccaggcaatcagattctcagtggcctctccattgaagaatataagaccacgttgaaaataatcaagcaagctattttagctacagacctagcactgtacattaagaggcgaggagaattttttgaacttataagaaaaaatcaattcaatttggaagatcctcatcaaaaggagttgtttttggcaatgctgatgacagcttgtgatctttctgcaattacaaaaccctggcctattcaacaacggatagcagaacttgtagcaactgaattttttgatcaaggagacagagagagaaaagaactcaacatagaacccactgatctaatgaacagggagaagaaaaacaaaatcccaagtatgcaagttgggttcatagatgccatctgcttgcaactgtatgaggccctgacccacgtgtcagaggactgtttccctttgctagatggctgcagaaagaacaggcagaaatggcaggcccttgcagaacagcagtga

SEQ ID NO: 8359 - DNA, 2235 bp, Artificial Sequence
  source: /note="Description of Artificial Sequence: Synthetic Construct"
atggactggacatggatactcttcctggtagcagccgccacacgagtgcacagcgactacaaagacgatgacgacaagaactgggtgaacgtgatctccgacctgaaaaagatcgaggatttgatccagagcatgcacattgacgccaccctgtataccgagtccgacgtgcacccgagttgcaaggtgactgccatgaagtgcttcctgctggagctgcaagtgatcagcctggagagcggcgacgccagcatccacgacaccgtggaaaaccttatcattctggccaacaatagcctgagcagcaacggcaacgtgaccgaaagcggatgtaaggaatgcgaggaactggaagagaagaatatcaaagaattcctgcaaagcttcgtgcacatcgtgcagatgttcatcaacacttcttcaggtggcggtagtggtgggggaggatctggaggcggaggaagcgggggtggaggttcaggtggaggcagcttgcaatacccatacgatgttccagattacgctattacctgcccccctccgatgagcgtggagcacgccgacatctgggtcaagagctacagcttgtatagtagggagcggtacatctgtaacagcgggttcaagaggaaggccgggaccagctcactgaccgagtgcgtgttgaacaaggccaccaacgtggcccactggaccacccctagccttaagtgcatcagggacccagcgctcgtacaccagagacccgcgcctccctctacggtaaccacggcaggcgtaaccccccagcccgagagcctgtccccgagcggcaaggagcctgcagcgagcagcccctcaagcaacaacacagccgctaccaccgcggcaatcgtgcccggcagccagctgatgccctcaaagagccccagcaccggcaccactgagataagcagccacgagagctcacacggcactccctcacagaccactgccaagaattgggagctgaccgcctctgccagccaccagcccccaggcgtgtatccccagggccacagcgacaccacggtcgccatcagcacatctacagtgcttttgtgcggccttagcgccgtgtcactgctggcatgctacttgaaaagtaggcaaactccccctcttgccagtgtggaaatggaggccatggaagccctgcccgtgacctggggcaccagttctagggacgaggaccttgagaactgctcacatcatttgggatcaggttccggatccgaagaaacaagagagctacagtcgttagcggctgctgtggtgccatctgcccagacccttaaaattactgactttagcttcagtgactttgagctgtctgatctggaaacagcactgtgtacaattcggatgtttactgacctcaaccttgtgcagaacttccagatgaaacatgaggttctttgcagatggattttaagtgttaagaagaattatcggaagaatgttgcctatcataattggagacatgcctttaatacagctcagtgcatgtttgctgctctaaaagcaggcaaaattcagaacaagctgactgacctggagatacttgcattgctgattgctgcactaagccacgatttggatcaccgtggtgtgaataactcttacatacagcgaagtgaacatccacttgcccagctttactgccattcaatcatggaacaccatcattttgaccagtgcctgatgattcttaatagtccaggcaatcagattctcagtggcctctccattgaagaatataagaccacgttgaaaataatcaagcaagctattttagctacagacctagcactgtacattaagaggctaggagaattttttgaacttataagaaaaaatcaattcaatttggaagatcctcatcaaaaggagttgtttttggcaatgctgatgacagcttgtgatctttctgcaattacaaaaccctggcctattcaacaacggatagcagaacttgtagcaactgaattttttgatcaaggagacagagagagaaaagaactcaacatagaacccactgatctaatgaacagggagaagaaaaacaaaatcccaagtatgcaagttgggttcatagatgccatctgcttgcaactgtatgaggccctgacccacgtgtcagaggactgtttccctttgctagatggctgcagaaagaacaggcagaaatggcaggcccttgcagaacagcagtga

SEQ ID NO: 8360 - DNA, 2241 bp, Artificial Sequence
  source: /note="Description of Artificial Sequence: Synthetic Construct"
atggactggacatggatactcttcctggtagcagccgccacacgagtgcacagcgactacaaagacgatgacgacaagaactgggtgaacgtgatctccgacctgaaaaagatcgaggatttgatccagagcatgcacattgacgccaccctgtataccgagtccgacgtgcacccgagttgcaaggtgactgccatgaagtgcttcctgctggagctgcaagtgatcagcctggagagcggcgacgccagcatccacgacaccgtggaaaaccttatcattctggccaacaatagcctgagcagcaacggcaacgtgaccgaaagcggatgtaaggaatgcgaggaactggaagagaagaatatcaaagaattcctgcaaagcttcgtgcacatcgtgcagatgttcatcaacacttcttcaggtggcggtagtggtgggggaggatctggaggcggaggaagcgggggtggaggttcaggtggaggcagcttgcaatacccatacgatgttccagattacgctattacctgcccccctccgatgagcgtggagcacgccgacatctgggtcaagagctacagcttgtatagtagggagcggtacatctgtaacagcgggttcaagaggaaggccgggaccagctcactgaccgagtgcgtgttgaacaaggccaccaacgtggcccactggaccacccctagccttaagtgcatcagggacccagcgctcgtacaccagagacccgcgcctccctctacggtaaccacggcaggcgtaaccccccagcccgagagcctgtccccgagcggcaaggagcctgcagcgagcagcccctcaagcaacaacacagccgctaccaccgcggcaatcgtgcccggcagccagctgatgccctcaaagagccccagcaccggcaccactgagataagcagccacgagagctcacacggcactccctcacagaccactgccaagaattgggagctgaccgcctctgccagccaccagcccccaggcgtgtatccccagggccacagcgacaccacggtcgccatcagcacatctacagtgcttttgtgcggccttagcgccgtgtcactgctggcatgctacttgaaaagtaggcaaactccccctcttgccagtgtggaaatggaggccatggaagccctgcccgtgacctggggcaccagttctagggacgaggaccttgagaactgctcacatcatttgggatctggttccggatcaggatccgaagaaacaagagagctacagtcgttagcggctgctgtggtgccatctgcccagacccttaaaattactgactttagcttcagtgactttgagctgtctgatctggaaacagcactgtgtacaattcggatgtttactgacctcaaccttgtgcagaacttccagatgaaacatgaggttctttgcagatggattttaagtgttaagaagaattatcggaagaatgttgcctatcataattggagacatgcctttaatacagctcagtgcatgtttgctgctctaaaagcaggcaaaattcagaacaagctgactgacctggagatacttgcattgctgattgctgcactaagccacgatttggatcaccgtggtgtgaataactcttacatacagcgaagtgaacatccacttgcccagctttactgccattcaatcatggaacaccatcattttgaccagtgcctgatgattcttaatagtccaggcaatcagattctcagtggcctctccattgaagaatataagaccacgttgaaaataatcaagcaagctattttagctacagacctagcactgtacattaagaggctaggagaattttttgaacttataagaaaaaatcaattcaatttggaagatcctcatcaaaaggagttgtttttggcaatgctgatgacagcttgtgatctttctgcaattacaaaaccctggcctattcaacaacggatagcagaacttgtagcaactgaattttttgatcaaggagacagagagagaaaagaactcaacatagaacccactgatctaatgaacagggagaagaaaaacaaaatcccaagtatgcaagttgggttcatagatgccatctgcttgcaactgtatgaggccctgacccacgtgtcagaggactgtttccctttgctagatggctgcagaaagaacaggcagaaatggcaggcccttgcagaacagcagtga

SEQ ID NO: 8361 - DNA, 2247 bp, Artificial Sequence
  source: /note="Description of Artificial Sequence: Synthetic Construct"
atggactggacatggatactcttcctggtagcagccgccacacgagtgcacagcgactacaaagacgatgacgacaagaactgggtgaacgtgatctccgacctgaaaaagatcgaggatttgatccagagcatgcacattgacgccaccctgtataccgagtccgacgtgcacccgagttgcaaggtgactgccatgaagtgcttcctgctggagctgcaagtgatcagcctggagagcggcgacgccagcatccacgacaccgtggaaaaccttatcattctggccaacaatagcctgagcagcaacggcaacgtgaccgaaagcggatgtaaggaatgcgaggaactggaagagaagaatatcaaagaattcctgcaaagcttcgtgcacatcgtgcagatgttcatcaacacttcttcaggtggcggtagtggtgggggaggatctggaggcggaggaagcgggggtggaggttcaggtggaggcagcttgcaatacccatacgatgttccagattacgctattacctgcccccctccgatgagcgtggagcacgccgacatctgggtcaagagctacagcttgtatagtagggagcggtacatctgtaacagcgggttcaagaggaaggccgggaccagctcactgaccgagtgcgtgttgaacaaggccaccaacgtggcccactggaccacccctagccttaagtgcatcagggacccagcgctcgtacaccagagacccgcgcctccctctacggtaaccacggcaggcgtaaccccccagcccgagagcctgtccccgagcggcaaggagcctgcagcgagcagcccctcaagcaacaacacagccgctaccaccgcggcaatcgtgcccggcagccagctgatgccctcaaagagccccagcaccggcaccactgagataagcagccacgagagctcacacggcactccctcacagaccactgccaagaattgggagctgaccgcctctgccagccaccagcccccaggcgtgtatccccagggccacagcgacaccacggtcgccatcagcacatctacagtgcttttgtgcggccttagcgccgtgtcactgctggcatgctacttgaaaagtaggcaaactccccctcttgccagtgtggaaatggaggccatggaagccctgcccgtgacctggggcaccagttctagggacgaggaccttgagaactgctcacatcatttgggatcaggttccggaggtggatctggatccgaagaaacaagagagctacagtcgttagcggctgctgtggtgccatctgcccagacccttaaaattactgactttagcttcagtgactttgagctgtctgatctggaaacagcactgtgtacaattcggatgtttactgacctcaaccttgtgcagaacttccagatgaaacatgaggttctttgcagatggattttaagtgttaagaagaattatcggaagaatgttgcctatcataattggagacatgcctttaatacagctcagtgcatgtttgctgctctaaaagcaggcaaaattcagaacaagctgactgacctggagatacttgcattgctgattgctgcactaagccacgatttggatcaccgtggtgtgaataactcttacatacagcgaagtgaacatccacttgcccagctttactgccattcaatcatggaacaccatcattttgaccagtgcctgatgattcttaatagtccaggcaatcagattctcagtggcctctccattgaagaatataagaccacgttgaaaataatcaagcaagctattttagctacagacctagcactgtacattaagaggctaggagaattttttgaacttataagaaaaaatcaattcaatttggaagatcctcatcaaaaggagttgtttttggcaatgctgatgacagcttgtgatctttctgcaattacaaaaccctggcctattcaacaacggatagcagaacttgtagcaactgaattttttgatcaaggagacagagagagaaaagaactcaacatagaacccactgatctaatgaacagggagaagaaaaacaaaatcccaagtatgcaagttgggttcatagatgccatctgcttgcaactgtatgaggccctgacccacgtgtcagaggactgtttccctttgctagatggctgcagaaagaacaggcagaaatggcaggcccttgcagaacagcagtga

SEQ ID NO: 8362 - DNA, 981 bp, Artificial Sequence
  source: /note="Description of Artificial Sequence: Synthetic Destabilizing Domain (DD)"
gaagaaacaagagagctacagtcgttagcggctgctgtggtgccatctgcccagacccttaaaattactgactttagcttcagtgactttgagctgtctgatctggaaacagcactgtgtacaattcggatgtttactgacctcaaccttgtgcagaacttccagatgaaacatgaggttctttgcagatggattttaagtgttaagaagaattatcggaagaatgttgcctatcataattggagacatgcctttaatacagctcagtgcatgtttgctgctctaaaagcaggcaaaattcagaacaagctgactgacctggagatacttgcattgctgattgctgcactaagccacgatttggatcaccgtggtgtgaataactcttacatacagcgaagtgaacatccacttgcccagctttactgccattcaatcatggaacaccatcattttgaccagtgcctgatgattcttaatagtccaggcaatcagattctcagtggcctctccattgaagaatataagaccacgttgaaaataatcaagcaagctattttagctacagacctagcactgtacattaagaggctaggagaattttttgaacttataagaaaaaatcaattcaatttggaagatcctcatcaaaaggagttgtttttggcaatgctgatgacagcttgtgatctttctgcaattacaaaaccctggcctattcaacaacggatagcagaacttgtagcaactgaattttttgatcaaggagacagagagagaaaagaactcaacatagaacccactgatctaatgaacagggagaagaaaaacaaaatcccaagtatgcaagttgggttcatagatgccatctgcttgcaactgtatgaggccctgacccacgtgtcagaggactgtttccctttgctagatggctgcagaaagaacaggcagaaatggcaggcccttgcagaacagcagtga

SEQ ID NO: 8363 - DNA, 981 bp, Artificial Sequence
  source: /note="Description of Artificial Sequence: Synthetic Destabilizing Domain (DD)"
gaagaaacaagagagctacagtcgttagcggctgctgtggtgccatctgcccagacccttaaaattactgactttagcttcagtgactttgagctgtctgatctggaaacagcactgtgtacaattcggatgtttactgacctcaaccttgtgcagaacttccagatgaaacatgaggttctttgcagatggattttaagtgttaagaagaattatcggaagaatgttgcctatcataattggagacatgcctttaatacagctcagtgcatgtttgctgctctaaaagcaggcaaaattcagaacaagctgactgacctggagatacttgcattgctgattgctgcactaagccacgatttggatcaccgtggtgtgaataactcttacatacagcgaagtgaacatccacttgcccagctttactgccattcaatcatggaacaccatcattttgaccagtgcctgatgattcttaatagtccaggcaatcagattctcagtggcctctccattgaagaatataagaccacgttgaaaataatcaagcaagctattttagctacagacctagcactgtacattaagaggctaggagaatttgctgaacttataagaaaaaatcaattcaatttggaagatcctcatcaaaaggagttgtttttggcaatgctgatgacagcttgtgatctttctgcaattacaaaaccctggcctattcaacaacggatagcagaacttgtagcaactgaattttttgatcaaggagacagagagagaaaagaactcaacatagaacccactgatctaatgaacagggagaagaaaaacaaaatcccaagtatgcaagttgggttcatagatgccatctgcttgcaactgtatgaggccctgacccacgtgtcagaggactgtttccctttgctagatggctgcagaaagaacaggcagaaatggcaggcccttgcagaacagcagtga

SEQ ID NO: 8364 - protein, 415 aa, Homo sapiens
DEADRRLLRRCRLRLVEELQVDQLWDALLSRELFRPHMIEDIQRAGSGSRRDQARQLIIDLETRGSQALPLFISCLEDTGQDMLASFLRTNRQAAKLSKPTLENLTPVVLRPEIRKPEVLRPETPRPVDIGSGGFGDVGALESLRGNADLAYILSMEPCGHCLIINNVNFCRESGLRTRTGSNIDCEKLRRRFSSLHFMVEVKGDLTAKKMVLALLELAQQDHGALDCCVVVILSHGCQASHLQFPGAVYGTDGCPVSVEKIVNIFNGTSCPSLGGKPKLFFIQACGGEQKDHGFEVASTSPEDESPGSNPEPDATPFQEGLRTFDQLDAISSLPTPSDIFVSYSTFPGFVSWRDPKSGSWYVETLDDIFEQWAHSEDLQSLLLRVANAVSVKGIYKQMPGCFNFLRKKLFFKTS

SEQ ID NO: 8365 - DNA, 1251 bp, Homo sapiens
atggacgaagcggatcggcggctcctgcggcggtgccggctgcggctggtggaagagctgcaggtggaccagctctgggacgccctgctgagccgcgagctgttcaggccccatatgatcgaggacatccagcgggcaggctctggatctcggcgggatcaggccaggcagctgatcatagatctggagactcgagggagtcaggctcttcctttgttcatctcctgcttagaggacacaggccaggacatgctggcttcgtttctgcgaactaacaggcaagcagcaaagttgtcgaagccaaccctagaaaaccttaccccagtggtgctcagaccagagattcgcaaaccagaggttctcagaccggaaacacccagaccagtggacattggttctggaggatttggtgatgtcggtgctcttgagagtttgaggggaaatgcagatttggcttacatcctgagcatggagccctgtggccactgcctcattatcaacaatgtgaacttctgccgtgagtccgggctccgcacccgcactggctccaacatcgactgtgagaagttgcggcgtcgcttctcctcgctgcatttcatggtggaggtgaagggcgacctgactgccaagaaaatggtgctggctttgctggagctggcgcagcaggaccacggtgctctggactgctgcgtggtggtcattctctctcacggctgtcaggccagccacctgcagttcccaggggctgtctacggcacagatggatgccctgtgtcggtcgagaagattgtgaacatcttcaatgggaccagctgccccagcctgggagggaagcccaagctctttttcatccaggcctgtggtggggagcagaaagaccatgggtttgaggtggcctccacttcccctgaagacgagtcccctggcagtaaccccgagccagatgccaccccgttccaggaaggtttgaggaccttcgaccagctggacgccatatctagtttgcccacacccagtgacatctttgtgtcctactctactttcccaggttttgtttcctggagggaccccaagagtggctcctggtacgttgagaccctggacgacatctttgagcagtgggctcactctgaagacctgcagtccctcctgcttagggtcgctaatgctgtttcggtgaaagggatttataaacagatgcctggttgctttaatttcctccggaaaaaacttttctttaaaacatcataa

SEQ ID NO: 8366 - DNA, 1248 bp, Artificial Sequence
  source: /note="Description of Artificial Sequence: Synthetic Construct"
gacgaggccgacagaaggcttttgagaaggtgcaggctccggctggttgaggagctgcaagtcgaccaactgtgggacgccctgctgtccagggaactgtttaggccccacatgatcgaggacatccaaagagccgggtcaggatctaggagggatcaggctaggcaacttattatcgatctggaaaccagggggagccaagcccttcccctcttcatcagctgtctcgaggatacgggccaagacatgctcgccagttttctgagaacgaaccgacaggccgcaaagctgagtaaacccaccctggagaaccttacccctgtggtactcaggcccgaaatccggaagcccgaggtgctgaggccggagactccgaggcccgtggacatcggcagtggggggttcggtgacgtgggagcgctggaaagcctgcgcggcaacgctgacctcgcctacatccttagcatggagccgtgcggacactgtctgatcatcaacaacgtgaacttctgcagggagagcgggctgcggaccaggaccgggagcaatatcgattgcgaaaaactgaggaggaggttcagctcactgcacttcatggtggaggtgaagggcgacctgaccgccaagaagatggttctggccttgcttgagcttgcgcagcaagatcacggtgcccttgactgttgtgtggtggtgatactgagccacggctgtcaggccagccacctgcagtttccgggtgctgtctacgggaccgacgggtgccccgtgtctgtcgaaaagatagtgaacatcttcaacggcacgtcctgcccctcactgggcggcaagcccaagctcttctttatacaggcttgcggtggagagcagaaggaccatggcttcgaggtggccagcaccagccccgaggacgagagccctggtagcaatcccgagcccgatgccaccccatttcaagaaggattgaggaccttcgatcagctcgacgcgattagctctctgcccacccccagcgacatttttgtgagctacagcacgttcccgggtttcgtcagttggagggaccctaagagcggaagctggtatgtggagacgctggacgacatattcgagcaatgggcacacagcgaggatctgcagtcactcctgttgcgcgtggccaacgccgtttccgttaagggcatctataagcagatgccaggttgtttcaatttcctccgaaaaaagttgttctttaagaccagctga

SEQ ID NO: 8367 - protein, 285 aa, Homo sapiens
GVDGFGDVGALESLRGNADLAYILSMEPCGHCLIINNVNFCRESGLRTRTGSNIDCEKLRRRFSSLHFMVEVKGDLTAKKMVLALLELARQDHGALDCCVVVILSHGCQASHLQFPGAVYGTDGCPVSVEKIVNIFNGTSCPSLGGKPKLFFIQACGGEQKDHGFEVASTSPEDESPGSNPEPDATPFQEGLRTFDQLDAISSLPTPSDIFVSYSTFPGFVSWRDPKSGSWYVETLDDIFEQWAHSEDLQSLLLRVANAVSVKGIYKQMPGCFNFLRKKLFFKTS

SEQ ID NO: 8368 - DNA, 855 bp, Homo sapiens
ggcgtggacgggttcggtgacgtgggagcgctggaaagcctgcgcggcaacgctgacctcgcctacatccttagcatggagccgtgcggacactgtctgatcatcaacaacgtgaacttctgcagggagagcgggctgcggaccaggaccgggagcaatatcgattgcgaaaaactgaggaggaggttcagctcactgcacttcatggtggaggtgaagggcgacctgaccgccaagaagatggttctggccttgcttgagcttgcgcggcaagatcacggtgcccttgactgttgtgtggtggtgatactgagccacggctgtcaggccagccacctgcagtttccgggtgctgtctacgggaccgacgggtgccccgtgtctgtcgaaaagatagtgaacatcttcaacggcacgtcctgcccctcactgggcggcaagcccaagctcttctttatacaggcttgcggtggagagcagaaggaccatggcttcgaggtggccagcaccagccccgaggacgagagccctggtagcaatcccgagcccgatgccaccccatttcaagaaggattgaggaccttcgatcagctcgacgcgattagctctctgcccacccccagcgacatttttgtgagctacagcacgttcccgggtttcgtcagttggagggaccctaagagcggaagctggtatgtggagacgctggacgacatattcgagcaatgggcacacagcgaggatctgcagtcactcctgttgcgcgtggccaacgccgtttccgttaagggcatctataagcagatgccaggttgtttcaatttcctccgaaaaaagttgttctttaagaccagc

SEQ ID NO: 8369 - protein, 431 aa, Homo sapiens
MPNPRPGKPSAPSLALGPSPGASPSWRAAPKASDLLGARGPGGTFQGRDLRGGAHASSSSLNPMPPSQLQLPTLPLVMVAPSGARLGPLPHLQALLQDRPHFMHQLSTVDAHARTPVLQVHPLESPAMISLTPPTTATGVFSLKARPGLPPGINVASLEWVSREPALLCTFPNPSAPRKDSTLSAVPQSSYPLLANGVCKWPGCEKVFEEPEDFLKHCQADHLLDEKGRAQCLLQREMVQSLEQQLVLEKEKLSAMQAHLAGKMALTKASSVASSDKGSCCIVAAGSQGPVVPAWSGPREAPDSLFAVRRHLWGSHGNSTFPEFLHNMDYFKFHNMRPPFTYATLIRWAILEAPEKQRTLNEIYHWFTRMFAFFRNHPATWKNAIRHNLSLHKCFVRVESEKGAVWTVDELEFRKKRSQRPSRCSNPTPGP

SEQ ID NO: 8370 - DNA, 1296 bp, Homo sapiens
atgccgaacccaaggccagggaagccctctgctcctagcctggccctcggccccagccctggcgctagcccctcttggagggcggctccgaaggcttccgacctcctgggtgctaggggccctggtggaaccttccaaggcagggatctgcgaggaggggcgcacgcctctagctcaagcctgaacccgatgcccccctcacagctgcaactgcctaccctgccgctcgtcatggtggcccccagcggcgcaagactgggcccgttgccgcacctgcaagccttgctgcaggaccggccacatttcatgcaccagctcagcaccgtggacgcacatgcaaggacacccgtgctgcaagtccaccccctggagagccctgccatgatcagcctgacgccgcccaccaccgcaaccggcgtgttttcactgaaggcaagacccgggctgccaccgggcatcaacgtggccagcctggaatgggtgagcagggagccagcgctcctgtgtaccttcccaaacccatccgccccaagaaaggacagcaccctgtctgccgtgccccaatcatcttacccgctgctggcgaatggcgtatgcaagtggcccggatgtgaaaaggtgttcgaggagccggaagatttcctgaaacattgccaggccgaccacctgttggacgaaaagggaagggcccaatgcctgcttcagagggagatggtgcagagcttggagcaacaactcgtgctcgagaaggagaagctgagcgccatgcaggcacacctcgccggcaagatggccctgaccaaagccagtagcgtagccagctccgacaagggtagctgttgcatcgtggccgcaggaagtcaaggccccgttgtgcccgcctggagcggtccaagggaggcacccgactcactgttcgccgtgaggaggcatctgtggggcagccacggtaacagcacgttccccgagttcctgcataacatggactacttcaagttccacaacatgcggcctccattcacctacgccacactgataaggtgggctatcctggaggctcccgagaagcaaaggaccctgaacgagatctaccactggttcaccaggatgttcgctttctttaggaaccaccccgcgacctggaaaaacgccataaggcataacttgagccttcacaagtgcttcgtgagggtggagagtgagaaaggtgccgtgtggactgtggatgagttggagttccgcaagaagcgaagccaacgacctagcaggtgtagcaatccaacccccggaccctga

SEQ ID NO: 8371 - protein, 430 aa, Artificial Sequence
  source: /note="Description of Artificial Sequence: Synthetic Payload sequence"
PNPRPGKPSAPSLALGPSPGASPSWRAAPKASDLLGARGPGGTFQGRDLRGGAHASSSSLNPMPPSQLQLPTLPLVMVAPSGARLGPLPHLQALLQDRPHFMHQLSTVDAHARTPVLQVHPLESPAMISLTPPTTATGVFSLKARPGLPPGINVASLEWVSREPALLCTFPNPSAPRKDSTLSAVPQSSYPLLANGVCKWPGCEKVFEEPEDFLKHCQADHLLDEKGRAQCLLQREMVQSLEQQLVLEKEKLSAMQAHLAGKMALTKASSVASSDKGSCCIVAAGSQGPVVPAWSGPREAPDSLFAVRRHLWGSHGNSTFPEFLHNMDYFKFHNMRPPFTYATLIRWAILEAPEKQRTLNEIYHWFTRMFAFFRNHPATWKNAIRHNLSLHKCFVRVESEKGAVWTVDELEFRKKRSQRPSRCSNPTPGP

SEQ ID NO: 8372 - DNA, 1293 bp, Artificial Sequence
  source: /note="Description of Artificial Sequence: Synthetic Payload sequence"
ccgaacccaaggccagggaagccctctgctcctagcctggccctcggccccagccctggcgctagcccctcttggagggcggctccgaaggcttccgacctcctgggtgctaggggccctggtggaaccttccaaggcagggatctgcgaggaggggcgcacgcctctagctcaagcctgaacccgatgcccccctcacagctgcaactgcctaccctgccgctcgtcatggtggcccccagcggcgcaagactgggcccgttgccgcacctgcaagccttgctgcaggaccggccacatttcatgcaccagctcagcaccgtggacgcacatgcaaggacacccgtgctgcaagtccaccccctggagagccctgccatgatcagcctgacgccgcccaccaccgcaaccggcgtgttttcactgaaggcaagacccgggctgccaccgggcatcaacgtggccagcctggaatgggtgagcagggagccagcgctcctgtgtaccttcccaaacccatccgccccaagaaaggacagcaccctgtctgccgtgccccaatcatcttacccgctgctggcgaatggcgtatgcaagtggcccggatgtgaaaaggtgttcgaggagccggaagatttcctgaaacattgccaggccgaccacctgttggacgaaaagggaagggcccaatgcctgcttcagagggagatggtgcagagcttggagcaacaactcgtgctcgagaaggagaagctgagcgccatgcaggcacacctcgccggcaagatggccctgaccaaagccagtagcgtagccagctccgacaagggtagctgttgcatcgtggccgcaggaagtcaaggccccgttgtgcccgcctggagcggtccaagggaggcacccgactcactgttcgccgtgaggaggcatctgtggggcagccacggtaacagcacgttccccgagttcctgcataacatggactacttcaagttccacaacatgcggcctccattcacctacgccacactgataaggtgggctatcctggaggctcccgagaagcaaaggaccctgaacgagatctaccactggttcaccaggatgttcgctttctttaggaaccaccccgcgacctggaaaaacgccataaggcataacttgagccttcacaagtgcttcgtgagggtggagagtgagaaaggtgccgtgtggactgtggatgagttggagttccgcaagaagcgaagccaacgacctagcaggtgtagcaatccaacccccggaccctga

SEQ ID NO: 8373 - protein, 396 aa, Homo sapiens
MPNPRPGKPSAPSLALGPSPGASPSWRAAPKASDLLGARGPGGTFQGRDLRGGAHASSSSLNPMPPSQLQLSTVDAHARTPVLQVHPLESPAMISLTPPTTATGVFSLKARPGLPPGINVASLEWVSREPALLCTFPNPSAPRKDSTLSAVPQSSYPLLANGVCKWPGCEKVFEEPEDFLKHCQADHLLDEKGRAQCLLQREMVQSLEQQLVLEKEKLSAMQAHLAGKMALTKASSVASSDKGSCCIVAAGSQGPVVPAWSGPREAPDSLFAVRRHLWGSHGNSTFPEFLHNMDYFKFHNMRPPFTYATLIRWAILEAPEKQRTLNEIYHWFTRMFAFFRNHPATWKNAIRHNLSLHKCFVRVESEKGAVWTVDELEFRKKRSQRPSRCSNPTPGP

SEQ ID NO: 8374 - DNA, 1188 bp, Artificial Sequence
  source: /note="Description of Artificial Sequence: Synthetic Payload sequence"
atgccgaacccaaggccagggaagccctctgctcctagcctggccctcggccccagccctggcgctagcccctcttggagggcggctccgaaggcttccgacctcctgggtgctaggggccctggtggaaccttccaaggcagggatctgcgaggaggggcgcacgcctctagctcaagcctgaacccgatgcccccctcacagctgcagctcagcaccgtggacgcacatgcaaggacacccgtgctgcaagtccaccccctggagagccctgccatgatcagcctgacgccgcccaccaccgcaaccggcgtgttttcactgaaggcaagacccgggctgccaccgggcatcaacgtggccagcctggaatgggtgagcagggagccagcgctcctgtgtaccttcccaaacccatccgccccaagaaaggacagcaccctgtctgccgtgccccaatcatcttacccgctgctggcgaatggcgtatgcaagtggcccggatgtgaaaaggtgttcgaggagccggaagatttcctgaaacattgccaggccgaccacctgttggacgaaaagggaagggcccaatgcctgcttcagagggagatggtgcagagcttggagcaacaactcgtgctcgagaaggagaagctgagcgccatgcaggcacacctcgccggcaagatggccctgaccaaagccagtagcgtagccagctccgacaagggtagctgttgcatcgtggccgcaggaagtcaaggccccgttgtgcccgcctggagcggtccaagggaggcacccgactcactgttcgccgtgaggaggcatctgtggggcagccacggtaacagcacgttccccgagttcctgcataacatggactacttcaagttccacaacatgcggcctccattcacctacgccacactgataaggtgggctatcctggaggctcccgagaagcaaaggaccctgaacgagatctaccactggttcaccaggatgttcgctttctttaggaaccaccccgcgacctggaaaaacgccataaggcataacttgagccttcacaagtgcttcgtgagggtggagagtgagaaaggtgccgtgtggactgtggatgagttggagttccgcaagaagcgaagccaacgacctagcaggtgtagcaatccaacccccggaccc

SEQ ID NO: 8375 - protein, 395 aa, Artificial Sequence
  source: /note="Description of Artificial Sequence: Synthetic Payload sequence"
PNPRPGKPSAPSLALGPSPGASPSWRAAPKASDLLGARGPGGTFQGRDLRGGAHASSSSLNPMPPSQLQLSTVDAHARTPVLQVHPLESPAMISLTPPTTATGVFSLKARPGLPPGINVASLEWVSREPALLCTFPNPSAPRKDSTLSAVPQSSYPLLANGVCKWPGCEKVFEEPEDFLKHCQADHLLDEKGRAQCLLQREMVQSLEQQLVLEKEKLSAMQAHLAGKMALTKASSVASSDKGSCCIVAAGSQGPVVPAWSGPREAPDSLFAVRRHLWGSHGNSTFPEFLHNMDYFKFHNMRPPFTYATLIRWAILEAPEKQRTLNEIYHWFTRMFAFFRNHPATWKNAIRHNLSLHKCFVRVESEKGAVWTVDELEFRKKRSQRPSRCSNPTPGP

SEQ ID NO: 8376 - DNA, 1185 bp, Artificial Sequence
  source: /note="Description of Artificial Sequence: Synthetic Payload sequence"
ccgaacccaaggccagggaagccctctgctcctagcctggccctcggccccagccctggcgctagcccctcttggagggcggctccgaaggcttccgacctcctgggtgctaggggccctggtggaaccttccaaggcagggatctgcgaggaggggcgcacgcctctagctcaagcctgaacccgatgcccccctcacagctgcagctcagcaccgtggacgcacatgcaaggacacccgtgctgcaagtccaccccctggagagccctgccatgatcagcctgacgccgcccaccaccgcaaccggcgtgttttcactgaaggcaagacccgggctgccaccgggcatcaacgtggccagcctggaatgggtgagcagggagccagcgctcctgtgtaccttcccaaacccatccgccccaagaaaggacagcaccctgtctgccgtgccccaatcatcttacccgctgctggcgaatggcgtatgcaagtggcccggatgtgaaaaggtgttcgaggagccggaagatttcctgaaacattgccaggccgaccacctgttggacgaaaagggaagggcccaatgcctgcttcagagggagatggtgcagagcttggagcaacaactcgtgctcgagaaggagaagctgagcgccatgcaggcacacctcgccggcaagatggccctgaccaaagccagtagcgtagccagctccgacaagggtagctgttgcatcgtggccgcaggaagtcaaggccccgttgtgcccgcctggagcggtccaagggaggcacccgactcactgttcgccgtgaggaggcatctgtggggcagccacggtaacagcacgttccccgagttcctgcataacatggactacttcaagttccacaacatgcggcctccattcacctacgccacactgataaggtgggctatcctggaggctcccgagaagcaaaggaccctgaacgagatctaccactggttcaccaggatgttcgctttctttaggaaccaccccgcgacctggaaaaacgccataaggcataacttgagccttcacaagtgcttcgtgagggtggagagtgagaaaggtgccgtgtggactgtggatgagttggagttccgcaagaagcgaagccaacgacctagcaggtgtagcaatccaacccccggaccc

SEQ ID NO: 8377 - protein, 10 aa, Artificial Sequence
  source: /note="Description of Artificial Sequence: Synthetic peptide"
  MOD_RES (3)..(4): Any amino acid
  MOD_RES (6)..(9): Any amino acid
HDXXHXXXXN

SEQ ID NO: 8378 - protein, 4 aa, Artificial Sequence
  source: /note="Description of Artificial Sequence: Synthetic peptide"
GGGG

SEQ ID NO: 8379 - protein, 5 aa, Artificial Sequence
  source: /note="Description of Artificial Sequence: Synthetic peptide"
GGGGG

SEQ ID NO: 8380 - protein, 8 aa, Artificial Sequence
  source: /note="Description of Artificial Sequence: Synthetic peptide"
GGGGGGGG

SEQ ID NO: 8381 - protein, 8 aa, Artificial Sequence
  source: /note="Description of Artificial Sequence: Synthetic peptide"
  VARIANT (2)..(2): /replace="Ile"
  MOD_RES (4)..(4): Any amino acid
  SITE (1)..(8): /note="Variant residues given in the sequence have no preference with respect to those in the annotations for variant positions"
DVEXNPGP

SEQ ID NO: 8382 - protein, 7 aa, Artificial Sequence
  source: /note="Description of Artificial Sequence: Synthetic peptide"
SGSGSGS

SEQ ID NO: 8383 - protein, 326 aa, Artificial Sequence
  source: /note="Description of Artificial Sequence: Synthetic Destabilizing Domain (DD)"
EETRELQSLAAAVVPSAQTLKITDFSFSDFELSDLETALCTIRMFTDLNLVQNFQMKHEVLCRWILSVKKNYRKNVAYHNWRHAFNTAQCMFAALKAGKIQNKLTDLEILALLIAALSHDLDHRGVNNSYIQRSEHPLAQLYCHSIMAHHHFDQCLMILNSPGNQILSGLSIEEYKTTLKIIKQAILATDLALYIKRRGEFFELIRKNQFNLEDPHQKELFLAMLMTACDLSAITKPWPIQQRIAELVATEFFDQGDRERKELNIEPTDLMNREKKNKIPSMQVGFIDAICLQLYEALTHVSEDCFPLLDGCRKNRQKWQALAEQQ

SEQ ID NO: 8384 - protein, 326 aa, Artificial Sequence
  source: /note="Description of Artificial Sequence: Synthetic Destabilizing Domain (DD)"
EETRELQSLAAAVVPSAQTLKITDFSFSDFELSDLETALCTIRMFTDLNLVQNFQMKHEVLCRWILSVKKNYRKNVAYHNWRHAFNTAQCMFAALKAGKIQNKLTDLEILALLIAALSHDLDHRGVNNSYIQRSEHPLAQLYCHSIMEHHHFDQCLMILNSPGNQILSGLSIEEYKTTLKIIKQAILATALALYIKRRGEFFELIRKNQFNLEDPHQKELFLAMLMTACDLSAITKPWPIQQRIAELVATEFFDQGDRERKELNIEPTDLMNREKKNKIPSMQVGFIDAICLQLYEALTHVSEDCFPLLDGCRKNRQKWQALAEQQ

SEQ ID NO: 8385 - DNA, 978 bp, Artificial Sequence
  source: /note="Description of Artificial Sequence: Synthetic Destabilizing Domain (DD)"
gaagaaacaagagagctacagtcgttagcggctgctgtggtgccatctgcccagacccttaaaattactgactttagcttcagtgactttgagctgtctgatctggaaacagcactgtgtacaattcggatgtttactgacctcaaccttgtgcagaacttccagatgaaacatgaggttctttgcagatggattttaagtgttaagaagaattatcggaagaatgttgcctatcataattggagacatgcctttaatacagctcagtgcatgtttgctgctctaaaagcaggcaaaattcagaacaagctgactgacctggagatacttgcattgctgattgctgcactaagccacgatttggatcaccgtggtgtgaataactcttacatacagcgaagtgaacatccacttgcccagctttactgccattcaatcatggcccaccatcattttgaccagtgcctgatgattcttaatagtccaggcaatcagattctcagtggcctctccattgaagaatataagaccacgttgaaaataatcaagcaagctattttagctacagacctagcactgtacattaagaggcgaggagaattttttgaacttataagaaaaaatcaattcaatttggaagatcctcatcaaaaggagttgtttttggcaatgctgatgacagcttgtgatctttctgcaattacaaaaccctggcctattcaacaacggatagcagaacttgtagcaactgaattttttgatcaaggagacagagagagaaaagaactcaacatagaacccactgatctaatgaacagggagaagaaaaacaaaatcccaagtatgcaagttgggttcatagatgccatctgcttgcaactgtatgaggccctgacccacgtgtcagaggactgtttccctttgctagatggctgcagaaagaacaggcagaaatggcaggcccttgcagaacagcag

SEQ ID NO: 8386 - DNA, 978 bp, Artificial Sequence
  source: /note="Description of Artificial Sequence: Synthetic Destabilizing Domain (DD)"
gaagaaacaagagagctacagtcgttagcggctgctgtggtgccatctgcccagacccttaaaattactgactttagcttcagtgactttgagctgtctgatctggaaacagcactgtgtacaattcggatgtttactgacctcaaccttgtgcagaacttccagatgaaacatgaggttctttgcagatggattttaagtgttaagaagaattatcggaagaatgttgcctatcataattggagacatgcctttaatacagctcagtgcatgtttgctgctctaaaagcaggcaaaattcagaacaagctgactgacctggagatacttgcattgctgattgctgcactaagccacgatttggatcaccgtggtgtgaataactcttacatacagcgaagtgaacatccacttgcccagctttactgccattcaatcatggaacaccatcattttgaccagtgcctgatgattcttaatagtccaggcaatcagattctcagtggcctctccattgaagaatataagaccacgttgaaaataatcaagcaagctattttagctacagccctagcactgtacattaagaggcgaggagaattttttgaacttataagaaaaaatcaattcaatttggaagatcctcatcaaaaggagttgtttttggcaatgctgatgacagcttgtgatctttctgcaattacaaaaccctggcctattcaacaacggatagcagaacttgtagcaactgaattttttgatcaaggagacagagagagaaaagaactcaacatagaacccactgatctaatgaacagggagaagaaaaacaaaatcccaagtatgcaagttgggttcatagatgccatctgcttgcaactgtatgaggccctgacccacgtgtcagaggactgtttccctttgctagatggctgcagaaagaacaggcagaaatggcaggcccttgcagaacagcag

SEQ ID NO: 8387 - protein, 326 aa, Artificial Sequence
  source: /note="Description of Artificial Sequence: Synthetic Destabilizing Domain (DD)"
EETRELQSLAAAVVPSAQTLKITDFSFSDFELSDLETAMCTIRMFTDLNLVQNFQMKHEVLCRWILSVKKNYRKNVAYHNWRHAFNTAQCMFAALKAGKIQNKLTDLEILALLIAALSHDLDHRGVNNSYIQRSEHPLAQLYCHSIMEHHHFDQCLMILNSPGNQILSGLSIEEYKTTLKIIKQAILATDLALYIKRRGELFELIRKNQFNLEDPHQKELFLAMLMTACDLSAITKPWPIQQRIAELVATEFFDQGDRERKELNIEPTDLMNREKKNKIPSMQVGFIDAICLQLYEALTHVSEDCFPLLDGCRKNRQKWQALAEQQ

SEQ ID NO: 8388 - protein, 326 aa, Artificial Sequence
  source: /note="Description of Artificial Sequence: Synthetic Destabilizing Domain (DD)"
EETRELQSLAAAVVPSAQTLKITDFSFSDFELSDLETALCTIRMFTDLNLVQNFQMKHEVLCRWILSVKKNYRKNVAYHNWRHAFNTAQCMFAALKAGKIQNKLTDLEILALLIAALSHDLDHHGVNNSYIQRSEHPLAQLYCHSIMEHHHFDQCLMILNSPGNQILSGLSIEEYKTTLKIIKQAILATDLALYIKRRGEFFELIRKNQFNLEDPHQKELFLAMLMTACDLSAITKPWPIQQRIAELVATEFFDQGDRERKELNIEPTDLMNREKKNKIPSMQVGFIDAICLQLYEALTHVSEDCFPLLDGCRKNRQKWQALAEQQ

SEQ ID NO: 8389 - protein, 326 aa, Artificial Sequence
  source: /note="Description of Artificial Sequence: Synthetic Destabilizing Domain (DD)"
EETRELQSLAAAVVPSAQTLKITDFSFGDFELSDLETALCTIRMFTDLNLVQNFQMKHEVLCRWILSVKKNYRKNVAYHNWRHAFNTAQCMFAALKAGKIQNKLTDLEILALLIAALSHDLDHRGVNNSYIQRSEHPLAQLYCHSIMEHHHFDQCLMILNSPGNQILSGLSIEEYKTTLKIIKQAILATDLAPYIKRRGEFFELIRKNQFNLEDPHQKELFLAMLMTACDLSAITKPWPIQQRIAELVATEFFDQGDRERKELNIEPTDLMNREKKNKIPSMQVGFIDAICLQLYEALTHVSEDCFPLLDGCTKNRQKWQALAEQQ

SEQ ID NO: 8390 - protein, 326 aa, Artificial Sequence
  source: /note="Description of Artificial Sequence: Synthetic Destabilizing Domain (DD)"
EETRELQSLAAAVVPSAQTLKITDFSFSDFELSDLETALCTIRMFTDLNLVQNFQMKHEVLCRWILSVKKNYRKNVAYHNWRHAFNTAQCMFAALKAGKIQNKLTDLEILALLIAALSHDLDHRGVNNSYIHRSEHPLAQLYCHSIMEHHHFDQCLMILNSPGNQILSGLSIEEYKTTLKIIKQAILATDLALYIKRRGEFFELIRKNQFNLEDPHQKELFLAMLMTACDLSAITKPWPIQQRIAELVATEFFDQGDRERKELNIEPTDLMNREKKNKIPSMQVGFIDAICLQLYEALTHVSEDCFPLLDGCRKNRQKWQALAEQQ

SEQ ID NO: 8391 - protein, 326 aa, Artificial Sequence
  source: /note="Description of Artificial Sequence: Synthetic Destabilizing Domain (DD)"
EETRELQSLAAAVVPSAQTLKITDFSFSDFELSDLETALCTIRMFTDLNLVQNFQMKHEVLCRWILSVKKNYRKNVAYHNWRHAFNTAQCMFAALKAGKIQNKLTDLEILALLIAALSHDLDHRGVNNSYIQRSEHPLAQLYCHSIMEHHHFDQCLMILNSPGNQILSGLSIEEYKTTLKIIKQAILATDLALYIKRRGEFFELIRKNQFNLEDPHQKELFLAMLMTACDLSAITKPWPIQQRIAEPVATEFFDQGDRERKELNIEPTDLMNREKKNKIPSMQVGFIDAICLQLYEALTHVSEDCFPLLDGCRKNRQKWQALAEQQ

SEQ ID NO: 8392 - protein, 326 aa, Artificial Sequence
  source: /note="Description of Artificial Sequence: Synthetic Destabilizing Domain (DD)"
EETRELQSLAAAVVPSAQTLKITDFSFSDFELSDLETALCTIRMFTDLNLVQNFQMKHEVLCRWILSVKKNYRKNVAYHNWRHAFNTAQCMFAALKAGKIQNKLTDLEILALLIAALSHDLDHRGVNNSYIQRSEHPLAQLYCHSIMEHHHFDQCLMILNSPGNQILSGLSIEEYKTTLKIIKQAILATDLALYIKRRGEFFELIRKNQFNLEDPHQKELFLAMLMTACDLSEITKPWPIQQRIAELVATEFFDQGDRERKELNIEPTDLMNREKKNKIPSMQVGFIDAICLQLYEALTHVSEDCFPLLDGCRKNRQKWQALAEQQ

SEQ ID NO: 8393 - protein, 326 aa, Artificial Sequence
  source: /note="Description of Artificial Sequence: Synthetic Destabilizing Domain (DD)"
EETRELQSLAAAVVPSAQTLKITDFSFSDFELSDLESALCTIRMFTDLNLMQNFQMKHEVLCRWILSVKKNYRKNVAYHNWRHAFNTAQCMFAALKAGKIQNKLTDLEILALLIAALSHDLDHRGVNNSYIQRSEHPLAQLYCHSIMEHHHFDQCLMILNSPGNQILSGLSIEEYKTTLKIIKQAILASDLALYIKRRGEFFELIRKNQFNLEDPHQKELFLAMLMTACDLSAITKPWPIQQRIAELVATEFFDQGDRERKELNIEPTDLMNREKKNKIPSMQVGFIDAICLQLYEALTHVSEDCFPLLDGCRKNRQKWQALAEQQ

SEQ ID NO: 8394 - protein, 326 aa, Artificial Sequence
  source: /note="Description of Artificial Sequence: Synthetic Destabilizing Domain (DD)"
EETRELQSLAAAVVPSAQTLKITDFSFSDFELSDLETALCTIRMFTDLNLVQNFQMKHEVLCRWILSVKKNYRKNVAYHNWRHAFNTAQCMFAALKAGKIQNKLTDLEILALLIAALSHDLDHRGVNNSYIQRSEHPLAQLYCHSIMEHHHFDQCLMILNSPGNQILSGLSIEEYKTTLKIIKQAILATDLALYIKRRGEFFELIRKNLFNLEDPHQKELFLAMLMTACDLSAITKPWPIQQRIAELVATEFFDQGDRERKELNIEPTDLMNREKKNKIPSMQVGFIDAICLQLYEALTHVSEDCFPLLDGCRKNRQKWQALAEQQ

SEQ ID NO: 8395 - protein, 326 aa, Artificial Sequence
  source: /note="Description of Artificial Sequence: Synthetic Destabilizing Domain (DD)"
EETRELQSLAAAVVPSAQTLKITDFSFSDFELSDLETALCTIRMFTDLNLVQNFQMKHEVLCRWILSVKKNYRKNVAYHNWRHAFNTAQCMFAALKAGKIQNKLTDLEILALLIAALSHDLDHRGVNNSYIQRSEHPLAQLYCHSIMEHHHFDQCLMILNSPGNQILSGLSIEEHKTTLKIIKQAILATDLALYIKRRGEFFELIRKNQFNLEDPHQKELFLAMLMTACDLSAITKPWPIQQRIAELVATEFVDQGDRERKELNIEPTDLMNREKKNKIPSMQVGFIDAICLQLYEALTHVSEDCFPLLDGCRKNRQKWQALAEQQ

SEQ ID NO: 8396 - protein, 326 aa, Artificial Sequence
  source: /note="Description of Artificial Sequence: Synthetic Destabilizing Domain (DD)"
EETRELQSLAAAVVPSAQTLKITDFSFSDFELSDLETALCTIRMFTDLNLVQNFQMKHEVLCRWILSVKKYYRKNVAYHNWRHAFNTAQCMFAALKAGKIQNKLTDLEILALLIAALSHDLDHRGVNNSYIQRSEHPLAQLYCHSIMEHHHFDQCLMILNSPGNQILSGLSIEEYKTTLKKIKQAILATDLALYIKRRGEFFELIRKNQFNLEDPHQKELFLAMLMTACDLSAITKPWPIQQRIAELVATEFFDQGDRERKELNIEPTDLMNREKKNKIPSMQVGFIDAICLQLYEALTHVSEDCFPLLDGCRKNRQKWQALAEQQ

SEQ ID NO: 8397 - protein, 326 aa, Artificial Sequence
  source: /note="Description of Artificial Sequence: Synthetic Destabilizing Domain (DD)"
EETRELQSLAAAVVPSAQTLKITDFSFSDIELSDLETALCTIRMFTDLNLVQNFQMKHEVLCRWILSVKKNYRKNVAYHNWRHAFNTAQCMFAALKAGKIQNKLTDLEILALLIAALSHDLDHRGVNYSYIQRSEHPLAQLYCHSIMEHHLFDQCLMIPNSPGNQILSGLSIEEYKTTLKIIKQAILATDLALYIKRRGEFIELIRKNQFNLEDPHQKELFLAMLMTACDLSAITKPWPIQQRIAELVATEFFDQGDRERKELNIEPTDLMNREKKNKIPSMQVGFIDAICLQLYEALTHVSEDCFPLLDGCRKNRQKWQALAEQQ

SEQ ID NO: 8398 - protein, 326 aa, Artificial Sequence
  source: /note="Description of Artificial Sequence: Synthetic Destabilizing Domain (DD)"
EETRELQSLAAAVVPSAQTLKITDFSFSDFELSDLETALCTIRMFTDLNLVQNFQMKHEVLCRWILSVKKNYRKNVAYHNWRHAFNTAQCMFAALKAGKIQNKLTDLEILALLIAALSHDLDHRGVNNSYIQRSEHPLAQLYCHSIMEHHHFDQCLMILNSPGNQILSGLSIEEYKTTLKIIKQAILVTDLALYIKRRGEFFELIRKNQFNLEDPHQKELLLAMLITACDLSAITKPWPIQQRIAELVATEFFDQGDRERKELNIEPTDLMNREKKNKIPSMQVGFIDAICLQLYEALTHVSEDCFPLLDGCRKNRQKWQALAEQQ

SEQ ID NO: 8399 - protein, 326 aa, Artificial Sequence
  source: /note="Description of Artificial Sequence: Synthetic Destabilizing Domain (DD)"
EETRELQSLAAAVVPSAQTLKITDFSFSDFELSDLETALCTIRMFTDLNLVQNFQMKHEILCRWILSVKKNYRKNVAYHNWRHAFNTAQCMFAALKAGKIQNKLTDLEILALLIAALSHDLDHRGVNNSYIQRSEHPLAQLYCHSIMEHHHFDQCLMILNSPGNQILSGLSIEEYKTTLKIIKQAILATDLALYIKRRGEFFELIRKNQFNLEDPHQKELFLAMLMTACDLSAITKPWPIQQRIAELVATEFFDQGDRERKELNIEPTDLMNREKKNKIPSMQVGFIDAICLQLYEALTHVSEDCFPLLDGCRKNRQKWQALAEQQ

SEQ ID NO: 8400 - protein, 326 aa, Artificial Sequence
  source: /note="Description of Artificial Sequence: Synthetic Destabilizing Domain (DD)"
EETRELQSLAAAVVPSAQTLKITDFSFSDFELSDLETALCTIRMFTDLNLVQNFQMKREVLCRWILSVKKNYRKNVAYHNWRHAFNTAQCMFAALKAGKIQNKLTDLEILALLIAALSHDLDHRGVNNSYIQRSEHPLAQLYCHSIMEHHHFDQCLMILNSPGNQILSGLSIEEYKTTLKIIKQAILATDLALYIKRRGEFFELIRKNQFNLEDPHQKELFLAMLMTACDLSAITKPWPIQQRIAELVATEFFDQGDRERKELNIEPTDLMNREKKNKIPSMQVGFIDAICLQLYEALTHVSEDCFPLLDGCRKNRQKWQALAEQQ

SEQ ID NO: 8401 - protein, 326 aa, Artificial Sequence
  source: /note="Description of Artificial Sequence: Synthetic Destabilizing Domain (DD)"
EETRELQSLAAAVVPSAQTLKITDFSFSDFELSDLETALCTIRMFTDLNLVQNFQMKHEVLCRWILSVKKNYRKNVAYHNWRHAFNTAQCMFAALKAGKIQNKLTDLEILALLIAALSHDLDHRGVNNSYIQRSEHPLAQLYCHSIMEHHHFDQCLMILNSPGNQILSGLSIEEYKTTLKIIKQAILATDLALYIKRRGEFFELIRKNQFNLEDPHQKELFLAMLMTACDLSAITKPWPIQQRIAELVATEFFDQGDRERKELNIEPTDLMNREKKNKIPSMQVGFIDAICLQLYEALTHVSEDCFPLLDGCRKNRQKWQALAVQQ

SEQ ID NO: 8402 - protein, 326 aa, Artificial Sequence
  source: /note="Description of Artificial Sequence: Synthetic Destabilizing Domain (DD)"
EETRELQSLAAAVVPSAQTLKITDFSFSDFELSDLETALCTIRMFTDLNLVQNFQMKHEVLCRWILSVKKNYRKNVAYHNWRHAFNTAQCMFAALKAGKIQNKLTDLEILALLIAALSHDLDHRGVNNSYIQRSEHPLAQLYCHSIMEHHHFDQCLMILNSPGNQILSGLSIEEYKTTLKIIKQAILATDLALYIKRRGEFFELIRKNQFNLEDPHQKELFLAMLMTACDLSAITKPWPIQQRIAELVAIEFFDQGDRERKELNIEPTDLMNREKKNKIPSMQVGFIDAICLQLYEALTHVSEDCFPLLDGCRKNRQKWQALAEQQ

SEQ ID NO: 8403 - protein, 326 aa, Artificial Sequence
  source: /note="Description of Artificial Sequence: Synthetic Destabilizing Domain (DD)"
EETRELQLLAAAVVPSAQTLKITDFSFSDFELSDLETALCTIRMFTDLNLVQNFQMKHEVLCRWILSVKKNYRKNVAYHNWRHAFNTAQCMFAALKAGKIQNKLTDLEILALLIAALSHDLDHRGVNNSYIQRSEHPLAQLYCHSIMEHHHFDQCLMILNSPGNQILSGLSIEVYKTTLKIIKQAILATDLALYIKRRGEFFELIRKNQFNLEDPHQKELFLAMLMTACDLSAITKPCPIQQRIAELVATEFFDQGDRERKELNIEPTDLMNREKKNKIPSMQVGFIDAICLQLYEALTHVSEDCFPLLDGCRKNRQKWQALAEQQ

SEQ ID NO: 8404 - protein, 326 aa, Artificial Sequence
  source: /note="Description of Artificial Sequence: Synthetic Destabilizing Domain (DD)"
EETRELQSLAAAVVPSAQTLKITDFSFSDFELSDLETALCTIRMFTDLNLVQNFQMKHEVLCRWILSVKKNYRKNVAYHNWRHAFNTAQCMFAALKAGKIQNKLTDLEILALLIAALSHDLDHRGVNNSYIQRSEHPLAQLYCHSIMEHHHFDQCLMILNSPGNQFLSGLSIEEYKTTLKIIKQAILATDLALYIKRRGEFFELIRKNQFNLEDPHQKELFLAMLMTACDLSAITKPWPIQQRIAELVATEFFDQGDRERKGLNIEPTDLMNREKKNKIPSMQVGFIDAICLQLYEALTHVSEDCFPLLDGCRKNRQKWQALAEQQ

SEQ ID NO: 8405 - protein, 326 aa, Artificial Sequence
  source: /note="Description of Artificial Sequence: Synthetic Destabilizing Domain (DD)"
EETRELQSLAAAVVPSAQTLKITDFSFSDFELSDLETALCTIRMFTDLNLVQNFQMKHEVLCRWILSVKKNYRKNVAYHNWRHAFNTAQCMFAALKAGKIQNKLTDLEILALLIAALSHDLDHRGVNNSYIQRSEHPLAQLYCHSIMEHHHFDQCLMILNSPGNQILSGLSIEEYKTTLKIIKQAILATGLALYIKRRGEFFELIRKNQFNLEDPHQKELFLAMLMTACDLSAITKPWPIQQRIAELVATEFFDQGDRERKELNIEPTDLMNREKKNKIPSMQVGFIDAICLQLYEALTHVSEDCFPLLDGCRNNRQKWQALAEQQ

SEQ ID NO: 8406 - protein, 326 aa, Artificial Sequence
  source: /note="Description of Artificial Sequence: Synthetic Destabilizing Domain (DD)"
EETRELQSLAAAVVPSAQTLKITDFSFSDFELSDLETALCTIRMFTDLNLVQNFQMKHEVLCRWILSVKKNYRKNVAYHNWRHAFNTAQCMFAALKAGKIQNKLTDLEILALLIAALSHDLDHRGVNNSYIQRSEHPLAQLYCHSIMEHHHFDQCLMILNSPGNQILSGLSIEEYKTMLKIIKQAILATDLALYIKRRGEFFELIRKNQFNLEDPHQKELFLAILMTACDLSAITKPWPIQQRIAELVATEFFDQGDRERKELNIEPTDLMNREKKNKIPSMQVGFIDAICLQLYEALTHVSEDCFPLLDGCRKNRQKWQALAERQ

SEQ ID NO: 8407 - protein, 326 aa, Artificial Sequence
  source: /note="Description of Artificial Sequence: Synthetic Destabilizing Domain (DD)"
EETRELQSLAAAVVPSAQTLKSTDFSFSDFELSDLETALCTIRMFTDLNLVQNFQMKHEVLCRWILSVKKNYRKNVAYHNWRHAFNTAQCMFAALKAGKIQNKLTDLEILALLIAALSHDLDHRGVNNSYIQRSEHPLAQLYCHSIMEHHHFDQCLMILNSPGNQILSGLSIEEYKTTLKIIKQAILATDLALYIKRRGEFFELIRKNQFNLEDPHQKELFLAMLMTACDLSAITKPWPIQQRIAELVATEFFDQGDRERKDLNIEPTDLMNREKKNKIPSMQVGFIDAICLQLYEALTHVSEDCFPLLDGCRKNRQKWQALAEQQ

SEQ ID NO: 8408 - protein, 326 aa, Artificial Sequence
  source: /note="Description of Artificial Sequence: Synthetic Destabilizing Domain (DD)"
EETRELQSLAAAVVPSAQTLKITDFSFSDFELSDLETALCTIRMFTDLNLVQNFQMKHEVLCRWILSVKKNYRKNVAYHNWRHAFNTAQCMFAALKAGKIQNKLTDLEILALLIAALSHDLDHRGVNNSYIQRSEHPLAQLYCHSSMEHHHFDQCLMILNSPGNQILSGLSIEEYKTTLKIIKQAILATDLALYIKRRGEFFELIRKNQFNLEDPHQKELFLAMLMTACDLSAITKPWPIQQRIAELVATEFFDQGDRERKELNIEPTDLMNREKKNKIPSMQVGFIDAICLQLYEALTHVSEDCFPLLDGCRKNRQKWQALAEQQ

SEQ ID NO: 8409 - protein, 326 aa, Artificial Sequence
  source: /note="Description of Artificial Sequence: Synthetic Destabilizing Domain (DD)"
EETRELQSLAAAVVPSAQTLKITDFSFSDFELSDLETALCTIRMFTDLNLVQNFQMKHEVLCRWILSVKKNYRKNVAYLNWRHAFNTAQCMFAALKAGKIQNKLTDLEILALLIAALSHDLDHRGVNNSYIQRSEHPLAQLYCHSIMEHHHFDQCLMILNSPGNQILSGLSIEEYKTTLKIIKQAILATYLALYIKRRGEFFELIRKNQFNLEDPHQKELYLAMLMTACDLSAITKPWPIQQRIAELVATEFFDQGDRERKELNIEPTDLMNREKKNKIPSMQVGFIDAICLQLYEALTHVSEDCFPLLDGCRKNRQKWQALAEQQ

SEQ ID NO: 8410 - protein, 326 aa, Artificial Sequence
  source: /note="Description of Artificial Sequence: Synthetic Destabilizing Domain (DD)"
EETRELQSLAAAVVPSAQTLKITDFSFSDFELSDLETALCTIRMFTDLNLVQNFQMKHEVLCRWILSVKKNYRKNVTYHNWRHAFNTAQCMFAALKAGKIQNKLTDLEILALLIAALSHDLDHRGVNNSYIQRSEHPLAQLYCHSIMEHHHFDQCLMILNSPGNQILSGLSIEEYKTTLKIIKQAILATDLALYIKRRGEFFELIRKNQFNLEDPHQKELFLAMLMTACDLSAITKPWPIQQRIAELVATEFFDQGDRERKELNIEPTDLMNREKKNKIPSMQVGFIDAICLQLYEALTHVSEDCFPLLDGCRKNRQKWQALAEQQ

SEQ ID NO: 8411 - protein, 326 aa, Artificial Sequence; identical to SEQ ID NO: 39
  source: /note="Description of Artificial Sequence: Synthetic Destabilizing Domain (DD)"

SEQ ID NO: 8412 - protein, 326 aa, Artificial Sequence
  source: /note="Description of Artificial Sequence: Synthetic Destabilizing Domain (DD)"
EETRELQSLAAAVVPSAQTLKITDFSFSDFELSDMETALCTIRMFTDLNLVQNFQMKHEVLCRWILSVKKNYRKNVAYHNWRHAFNTAQCMFAALKAGKIQNKLTDLEILALLIAALSHDLDHRGVNNSYIQRSEHPLAQLYCHSIMEHHHFDQCLMILNSPGNQILSGLSIEEYKTTLKIIKQAILATDLALYIKRRGEFFELIRKNQFNLEDPHQKELFLAMLMTACDLSAITKPWPIQQRIAELVATEFFDQGDRERKELNIEPTDLMNREKKNKIPSMQVGFIDAICLQLYEALSHVSEDCFPLLDGCRKNRQKWQALAEQQ

SEQ ID NO: 8413 - protein, 326 aa, Artificial Sequence
  source: /note="Description of Artificial Sequence: Synthetic Destabilizing Domain (DD)"
EETRELQSLAAAVVPSAQTLKITDFSFSDFELSDLETALCTIRMFTDLNLVQNFQMKHEVLCRWILSVKKNYRKNVAYHNWRHAFNTAQCMFAALKAGKIQNKLTDLEILALLIAALSHDLDHRGVNNSYIQRSEHPLAQLYCHSIMEHHHFDQCLMILNSPGNQILSGLSIEEYKTTLKIIKQAILATDLALYIKRRGEFFELIRKNQFNLEDPHQKELFLAMLMTACDLSANTKPWPIQQRIAELVATEFFDQGDRERKELNIEPTDLMNREKKNKIPSMQVGFIDAICLQLYEALTHVSEDCFPLLDGCRKNRQKWQALAEQQ

SEQ ID NO: 8414 - protein, 326 aa, Artificial Sequence
  source: /note="Description of Artificial Sequence: Synthetic Destabilizing Domain (DD)"
EETRELQSLAAAVVPSAQTLKITDFSFSDFELSDLETALCTIRMFTDLNLVQNFQMKHEVLCRWILSVKKNYWKNVAYHNWRHAFNTAQCMFAALKAGKIQNKLTDLEILALLIAALSHDLDHRGVNNSYIQRSEHPLAQLYCHSIMEHHHFDQCLMILNSPGNQILSGLSIEEYKTTLKIIKQAILATDLALYIKRRGEFFELIRKNQFNLEDPHQKELFLAMLMTACDLSAITKPWPIQQRIAELVATEFFDQGDRERKELNIEPTDLMNREKKNKIPSMQVGFIDAICLQLYEALTHVSEDCFPLLDGCRKNRQKWQALAEQQ

SEQ ID NO: 8415 - protein, 326 aa, Artificial Sequence
  source: /note="Description of Artificial Sequence: Synthetic Destabilizing Domain (DD)"
EETRELQSLAAAVVPSAQTLKITDFSFSDFELSDLETALCTIRMFTDLNLVQNFQMKHEVLCRWILSVKKNYRKNVAYHNWRHAFSTAQCMFAALKAGKIQNKLTDLEILALLIAALSHDLDHRGVNNSYIQRSEHPLAQLYCHSIMEHHHFDQCLMILNSPGNQILSGLSIEEYKTTLKIIKQAILATDLALYIKRRGEFFELIRKNQFNLEDPHQKELFLAMLMTACDLSAITKPWPIQQRIAELVATEFFDQGDRERKELNIEPTDLMNREKKNKIPSMQVGFIDAICLQLYEALTHVSEDCFPLLDGCRKNRQKWQALAEQQ

SEQ ID NO: 8416 - protein, 326 aa, Artificial Sequence
  source: /note="Description of Artificial Sequence: Synthetic Destabilizing Domain (DD)"
EETRELQSLAAAVVPSAQTRKITDFSFSDFELSDLETALCTIRMFTDLNLVQNFEMKHEVLCRWILSVKKNYRKNVAYHNWRHAFNTAQCMFAALKAGKIQNKLTDLEILALLIAALSHDLDHRGVNNSYIQRSEHPLAQLYCHSIMEHHHFDQCLIILNSPGNQILSGLSIEEYKTTLKIIKQAILATDLALYIKRRGEFFELIRKNQFNLEDPHQKELFLAMLMTACDLSAITKPWPIQQRIAELVATEFFDQGDRERKELNIEPTDLMNREKKNKIPSMQVGFIDAICLQLYEALTHVSEDCFPLLDGCRKNRQKWQALAEQQ

SEQ ID NO: 8417 - protein, 326 aa, Artificial Sequence
  source: /note="Description of Artificial Sequence: Synthetic Destabilizing Domain (DD)"
EETRELQSLAAAVVPSAQTLKITDFSFSDFELSDLETALCTIRMFTDLNLVQNFQMKHEVLCRWILSVKKNYRKNVAYHNRRHAFNTAQCMFAALKAGKIQNKLTDLEILALLIAALSHDLDHRGVNNSYIQRSEHPLAQLYCHSIMEHHHFDQCLMILNSPGNQILSGLSIEEYKTTLKIIKQAILARDLALYIKRRGEFFELIRKNQFNLEDPHQKELFLAMLMTTCDLSAITKPWPIQQRIAELVATEFFDQGDRERKELNIEPTDLMNRGKKNKIPSMQVGFIDAICLQLYEALTHVSEDCFPLLDGCRKNRQKWQALAEQQ

SEQ ID NO: 8418 - protein, 326 aa, Artificial Sequence
  source: /note="Description of Artificial Sequence: Synthetic Destabilizing Domain (DD)"
EETRELQSLAAAVVPSAQTLKITDFSFSDFELSDLETALYTIRMFTDLNLVQNFQMKHEVLCRWILSVKKNYRKNVAYHNWRHAFNTAQCMFAALKAGKIQNKLTDLEILALLIAALSHDLDHRGVNNSYIQRSEHPLAQLYCHSIMEHHHFDQCLMILNSPGNQILSGLSIEEYKTTLKIIKQAILATDLALYIKRRGEFFELIRKNQFNLEDPHQKELFLAMLMTACDLSAITKPWPIQQRIAELVATEFFDQGDRERKELNIEPTDLMNREKKNKIPSMQVGFIDAICLQLYEALTHVSEDCFPLLDGCRKNRQKWQALAEQQ

SEQ ID NO: 8419 - protein, 326 aa, Artificial Sequence
  source: /note="Description of Artificial Sequence: Synthetic Destabilizing Domain (DD)"
EETRELQSLAAAVVPSAQTRKITDFSFSDFELSDLETALCTIRMFTDLNLVPNFQMKHEVLCRWILSVKKNYRKNVAYHNWRHAFNTAQCMFAALKAGKIQNKLTDLEILALLIAALSHDLDHRGVNNSYIQRSEHPLAQLYCHSIMEHHHFDQCLMILNSPGNQILSGLSIEEYNTTLKIIKQAILATDLALYIERRGEFFELIRKNQFNLEDPHQKELFLAMLMTACDLSAITKPWPIQQRIAELVATEFFDQGDRERKELNIEPTDLMNREKKNKIPSMQVGFIDAICLQLYEALTHVSEDCFPLLDGCRKNRQKWQALAEQQ

SEQ ID NO: 8420 - protein, 326 aa, Artificial Sequence
  source: /note="Description of Artificial Sequence: Synthetic Destabilizing Domain (DD)"
EETRELQSLAAAVVPSAQTLKITDFSFSDFELSDLETALCTIRMFTDLNLVQNFQMKHEVLCRWILSVKKNYRKNVAYRNWRHAFNTAQCMFAALKAGKIQNKLTDLEILALLIAALSHDLDHRGVNNSYIQRSEHPLAQLYCHSIMEHHHFDQCLMILNSPGNQILSGLSIEEYKTTLKIIKQAILATDLALYIKRRGEFFELIRKNQFNLEDPHQKELFLAMLMTACDLSAITKPWPIQQRIAELVATEFFDQGDRERKELNIEPTDLMNREKKNKIPSMQVGFIDAICLQLYEALTHVSEDCFPLLDGCRKNRQKWQALAEQQ

SEQ ID NO: 8421 - protein, 326 aa, Artificial Sequence
  source: /note="Description of Artificial Sequence: Synthetic Destabilizing Domain (DD)"
EETRELQSLAAAVVPSAQTLKITDFSFSDFELSDLETALCTIRMFTDLNLVLNFQMKHEVLCRWILSVKKNYRKNVAYHNWRHAFNTAQCMFAALKAGKIQNKLTDLEILALLIAALSHDLDHRGVNNYYIQRSEHPLAQLYCHSIMEHHHFDQCLMILNSPGNQILSGLSIEEYKTTLKIIKQAILATDLALYIKRRGEFFELIRKNQFNLEDPHQKELFLAMLMTTCDLSAITKPWPIQQRIAELVATEFFDQGDRERKELNIEPTDLMNRGKKNKIPSMQVGFIDAICLQLYEALTHVSEDCFPLLDGCRKNRQKWQALAEQQ

SEQ ID NO: 8422 - protein, 326 aa, Artificial Sequence
  source: /note="Description of Artificial Sequence: Synthetic Destabilizing Domain (DD)"
EETRELQSLAAAVMPSAQTLKITDFSFSDFELSDLETALCTIRMFTDLNLVQNFQMKHEVLCRWILSVKKNYRKNVAYHNWRHAFNTAQCMFAALKAGKIQNKLTDLEILALLIAALSHDLDHRGVNNSYIQRSEHPLAQLYCHSIMEHHHFDQCLMILNSPGNQILSGLSIEEYKTTLKIIKQAILATDLALYIKRRGEFFELIRKNQFNLEDPHQKELFLAMLMTACDLSAITKPWPIQQRIAELVATEFFDQGDRERKELNIEPTNLMNREKKNKIPSMQVGFIDAICLQLYEALTHVSEDCFPLLDGCRKNRQKWQALAEQQ

SEQ ID NO: 8423 - protein, 326 aa, Artificial Sequence
  source: /note="Description of Artificial Sequence: Synthetic Destabilizing Domain (DD)"
EETRELQSLAAAVVPSAQTRKITDFSFSDFELSDLETALCTIRMFTDLNLVQNFEMKHEVLCRWILSVKKNYRKNVAYHNWRHAFNTAQCMFAALKAGKIQNKLTDLEILALLIAALSHDLDHRGVNNSYIQRSEHPLAQLYCHSIMEHHHFDQCLMILNSPGNQILSGLSIEEYKTTLKIIKQAILATDLALYIKRRGEFFELIRKNQFNLEDPHQKELFLAMLMTACDLSAITKPWPIQQRIAELVATEFFDQGDRERKELNIEPTDLMNREKKNKIPSMQVGFIDTICLQLYEALTHVSEDCFPLLDGCRKNRQKWQALAEQQ

SEQ ID NO: 8424 - protein, 326 aa, Artificial Sequence
  source: /note="Description of Artificial Sequence: Synthetic Destabilizing Domain (DD)"
EETRELQSLAAAVVPSAQTLKITDFSFSDFELSDLEIALCTIRMFTDLNLVQNFQMKHEVLCRWILSVKRNYRKNVAYHNWRHAFNTAQCMFAALKAGKIQNKLTDLEILALLIAALSHDLDHRGVNNSYIQRSEHPLAQLYCHSIMEHHHFDQCLMILNSPGNQILSGLSNEEYKTTLKIIKQAILATDLALYIKRRGEFFELIRKNQFNLEDPHQKELFLAMLMTACDLSAITKPWPIQQRIAELVATEFFDQGDRERRELNIEPTDLMNREKKNKIPSMQVGFIDAICLQLYEALTHVSEDCFPLLDGCRKNRQKWQALAEQQ

SEQ ID NO: 8425 - protein, 326 aa, Artificial Sequence
  source: /note="Description of Artificial Sequence: Synthetic Destabilizing Domain (DD)"
EETRELQSLAAAVVPSAQTLKITDFSFSDFELSDLETALCTIRMFTDLNLVQNFQMKHEVLCRWILSVKKNYRKNVAYHNWRHAFNTAQCMFAALKAGKIQNKLTDLEILALLIAALSHDLDHRAVNNSYIQRSEHPLAQLYCHSIMEHHHFDQCLMILNSPGNQILSGLSIEEYKTTLKIIKQAILATDLALYIKRRGEFFELIRKNQFNLEDPHQKELFLAMLMTACDLSAITKPWPIQQRIAELVAIEFFDQGDRERKELNIEPTDLMNREKKNKIPSMQVGFIDAICLQLYEALTHVSEDCFPLLDGCRKNRQKWQALAEQQ

SEQ ID NO: 8426 - protein, 326 aa, Artificial Sequence; identical to SEQ ID NO: 8390
  source: /note="Description of Artificial Sequence: Synthetic Destabilizing Domain (DD)"

SEQ ID NO: 8427 - protein, 326 aa, Artificial Sequence
  source: /note="Description of Artificial Sequence: Synthetic Destabilizing Domain (DD)"
EETRELQSLAAAVVPSAQTLKITDFSFSDFELSDLETALCTIRMFTDLNLVQNFQMKHEVLCRWILSVKKNYRKNVAYHNWRLAFNTAQCMFAALKAGKIQNKLTDLEILALLIAALSHDLDHRGVNNSYIQRSEHPLAQLYCHSIMEHHHFDQCLMILNSPGNQILSGLSIEEYKTTLKIIKQAILVTDLALYIKRRGEFFELIRKNQFNLEDPHQKELFLAMLMTACDLSAITKPWPIQQRIAELVATEFFDQGDRERKELNIEPTDLMNREKKNKIPSMQVGFIDAICLQLYEALTHVSEDCFPLLDGCRKNRQKWQALAEQQ

SEQ ID NO: 8428 - protein, 326 aa, Artificial Sequence
  source: /note="Description of Artificial Sequence: Synthetic Destabilizing Domain (DD)"
EETRELQSLAAAVVPSAQTLKITDFSFSDFELSDLETALCTIRMFTDLNLVQNFQMKHEVLCRWILSVKKNYRKYVAYHNWRHAFNTAQCMFAALKAGKIQNKLTDLEILALLIAALSHDLDHRGVNNSYIQRSEHPLAQLYCHSIMEHHHFDQCLMILNSPGNQILSGLSIEEYKTTLKIIKQAILATDLALYIKRRGEFFELIRKNQFNLEDPHQKELFLAMLMTACDLSAITKPWPIQQRIAELVATEFFDQGDRERKELNLEPTDLMNREKKNKIPSMQVGFIDAICLQLYEALTHVSEDCFPLLDGCRKNRQKWQALAEQQ

SEQ ID NO: 8429 - protein, 326 aa, Artificial Sequence
  source: /note="Description of Artificial Sequence: Synthetic Destabilizing Domain (DD)"
EETRELQSLAAAVVPSAQTLKITDFSLSDFELSDLETALCTIRMFTDLNLVQNFQMKHEVLCRWILSVKKNYRKNVAYHNWRHAFNTAQCMFAALKAGKIQNKLTDLEILALLIAALSHDLDHRAVNNSYIQRSEHPLAQLYCHSIMEHHHFDQCLMILNSPGNQILSGLSIEEYKTTLKIIKQAILATDLALYIKRRGEFFELIRKNQFNLEDPHQKELFLAMLMTACDLSAITKPWPIQQRIAELVAIEFFDQGDRERKELNIEPTDLMNREKKNKIPSMQVGFIDAICLQLYEALTHVSEDCFPLLDGCRKNRQKWQALAEQQ

SEQ ID NO: 8430 - protein, 326 aa, Artificial Sequence
  source: /note="Description of Artificial Sequence: Synthetic Destabilizing Domain (DD)"
EETRELQSLAAAVVPSAQTLKITDFSFSDFELSDLETALCTIRMFTDLNLVQNFQMKHEVLCRWILSVKKNYRKNVAYHNWRHAFNTAQCMFAALKAGKIQNKLTDLEILALLIAALSHDLDHRGVNNSYIQRSEHPLAQLYCHSIMEHHHFDQCLMILNSPGNQILSGLSIEEYKTTLKIIKQAILATDLALYIKRRGEFFELIRKNQFNLEDPHQKELFLAMLMTACDLSAITKPWPIQQRIAELVATEFFDQGDRERNELNIEPTDLMNREKKNKIPSMQVGFIDAICLQLYEALTHVSEDCFPLLDGCRKNRQKWQALAEQQ

SEQ ID NO: 8431 - protein, 326 aa, Artificial Sequence
  source: /note="Description of Artificial Sequence: Synthetic Destabilizing Domain (DD)"
EETRELQSLAAAVVPSAQTLKITDFSFSDFELSDLETALCTIRMFTDLNLVQNFQMKHEVLCRWILSVKKNYRKNVAYHNWRHAFNTAQCMFAALKAGKIQNKLTDLEILALLIAALSHDLDHRGVNNSYIQRSEHPLAQLYCHSIMEHHHFDQCLMILNSPGNQILSGLSIEEYKTTLKIIKQAILATDLALYIKRRGEFFELIRKNQFNLEDPHQKELFLAMLMTACDLSAITQPWPIQQRIAELVATEFFDQGDRERKELNIEPTDLMNREKKNKIPSMQVGFIDAICLQLYEALTHVSEDCFPLLDGCRNNRQKWQALAEQQ

SEQ ID NO: 8432 - protein, 326 aa, Artificial Sequence
  source: /note="Description of Artificial Sequence: Synthetic Destabilizing Domain (DD)"
EETRELQSLAAAVVPSAQTLKITDFSFSDFELSDLETALCTIRMFTDLNLVQNFQMKHEVLCRWILSVKKDYRKNVAYHNWRHAFNTAQCMFAALKAGKIQNKLTDLEILALLIAALSHDLDHRGVNNSYIQRSEHPLAQLYCHSIMEHHHFDQCLMILNSPGNQILSGLSIEEYKTTLKIIKQAILATDLALYIKRRGEFFELIRKNQFNLEDPHQKELFLAMLMTACDLSAITKPWPIQQRIAELVATEFFDQGDRERKELNIEPTDLMNREKKNKIPSMQVGFIDAICLQLYEALTHVSEDCFPLLDGCRKNRQKWQALAEQQ

SEQ ID NO: 8433 - protein, 326 aa, Artificial Sequence; identical to SEQ ID NO: 8408
  source: /note="Description of Artificial Sequence: Synthetic Destabilizing Domain (DD)"

SEQ ID NO: 8434 - protein, 326 aa, Artificial Sequence
  source: /note="Description of Artificial Sequence: Synthetic Destabilizing Domain (DD)"
EETRELQSLAAAVMPSAQTLKITDFSFSDFELSDLETALCTIRMFTDLNLVQNFQMKHEVLCRWILSVKKNYRKNVAYHNWRHAFNTAQCMFAALKAGKIQNKLTDLEILALLIAALSHDLDHRGVNNSYIQRSEHPLAQLYCHSIMEHHHFDQCLMILNSPGNQILSGLSIEEYKTTLKIIKQAILATDLALYIKRRGEFFELIRKNQFNLEDPHQKELFLAMLMTACDLSAITKPWPIQQRIAELVATEFFDQGDRERKELNIEPTDLMNREKKNKIPSMQVGIIDAICLQLYEALTHVSEDCFPLLDGCRKNRQKWQALAEQQ

SEQ ID NO: 8435 - protein, 326 aa, Artificial Sequence
  source: /note="Description of Artificial Sequence: Synthetic Destabilizing Domain (DD)"
EETRELQSLAAAVVPSAQTLKITDFSFSDFELSDLETALCTIRMFTDLNLVQNFQMKHEVLCRWILSVKKNYRKNVAYHNWRHAFNTAQCMFAALKAGKIQNKLTDLEILALLIAALSHDLDHRGVNNSYIQRSEHPLAQLYCHSIMEHHHFDQCLMILNSPGNQILSGLSIEEYKTTLKIIKQAILATDLALYIKRRGEFFELIRKNQFNLEDPHQKELFLAMLMTACDLSAITKPWPIQQRIAELVATEFFDQGDRERKELNLEPTDLMNREKKNKIPSMQVGFIDAICLQLYEALTHVSEDCFPLLDGCRKNRQKWQALAEQQ

SEQ ID NO: 8436 - protein, 326 aa, Artificial Sequence
  source: /note="Description of Artificial Sequence: Synthetic Destabilizing Domain (DD)"
EETRELQSLAAAVVPSAQTLKITDFSFSDFELSDLETALCTIRMFTDLNLVQNFQMKHEVLCRWILSVKKNYQKNVAYHNWRHAFNTAQCMFAALKAGKIQNKLTDLEILALLIAALSHDLDHRGVNNSYIQRSEHPLAQLYCHSIMEHHHFDQCLMILNSPGNQILSGLSIEEYKTTLKIIKQAILATDLALYIKRRGEFFELIRKNQFNLEDPHQKELFLAMLMTACDLSAITKPWPIQQRIAELVATEFFDQGDRERKELNIEPTDLMNREKKNKIPSMQVGFIDAICLQLYEALTHVSEDCFPLLDGCRKNRQKWQALAEQQ

SEQ ID NO: 8437 - protein, 326 aa, Artificial Sequence
  source: /note="Description of Artificial Sequence: Synthetic Destabilizing Domain (DD)"
EETRELQSLAAAVVPFAQTRKITDFSFSDFELSDLETALCTIRMFTDLNLVQNFQMKHEVLCRWILSVKKNYRKNVAYHNWRHAFNTAQCMFAALKAGKIQNKLTDLEILALLIAALSHDLDHRGVNNSYIQRSEHPLAQLYCHSIMEHHHFDQCLMILNSPGNQILSGLSIEEYKTTLKIIKQAILATDLALYIKRRGEFFELIRKNQFNLEDPHQKELFLAMLMTACDLSAITKPWPIQQRIAELVATEFFDQGDRERKELNIEPTDLMNREKKNKIPSMQVGFIDAICLQLYEALTHVSEDCFPLLDGCRKNRQKWQALAEQQ

SEQ ID NO: 8438 - protein, 326 aa, Artificial Sequence
  source: /note="Description of Artificial Sequence: Synthetic Destabilizing Domain (DD)"
EETRELQSLAAAVVSSAQTLKITDFSFSDIELSDLETALCTIRMFTDLNLVQNFQMKHEVLCRWILSVKKNYRKNVAYHNWRHAFNTAQCMFAALKAGKIQNKLTDLEILALLIAALSHDLDHHGVNNSYIQRSEHPLAQLYCHSIMEHHHFDQCLMILNSPGNQILSGLSIEEYKTTLKIIKQAILATDLALYIKRRGEFFELIRKNQFNLEDPHQKELFLAMLMTACDLSAITKPWPIQQRITELVATEFFDQGDRERKELNIEPTDLMNREKKNKIPSMQVGFIDAICLQLYEALTHVSEDCFPLLDGCGKNRQKWQALAEQQ

SEQ ID NO: 8439 - DNA, 978 bp, Artificial Sequence
  source: /note="Description of Artificial Sequence: Synthetic Destabilizing Domain (DD)"
gaagaaacaagagagctacagtcgttagcggctgctgtggtgccatctgcccagacccttaaaattactgactttagcttcagtgactttgagctgtctgatctggaaacagcaatgtgtacaattcggatgtttactgacctcaaccttgtgcagaacttccagatgaaacatgaggttctttgcagatggattttaagtgttaagaagaattatcggaagaatgttgcctatcataattggagacatgcctttaatacagctcagtgcatgtttgctgctctaaaagcaggcaaaattcagaacaagctgactgacctggagatacttgcattgctgattgctgcactaagccacgatttggatcaccgtggtgtgaataactcttacatacagcgaagtgaacatccacttgcccagctttactgccattcaatcatggaacaccatcattttgaccagtgcctgatgattcttaatagtccaggcaatcagattctcagtggcctctccattgaagaatataagaccacgttgaaaataatcaagcaagctattttagctacagacctagcactgtacattaagaggcgaggagaattgtttgaacttataagaaaaaatcaattcaatttggaagatcctcatcaaaaggagttgtttttggcaatgctgatgacagcttgtgatctttctgcaattacaaaaccctggcctattcaacaacggatagcagaacttgtagcaactgaattttttgatcaaggagacagagagagaaaagaactcaacatagaacccactgatctaatgaacagggagaagaaaaacaaaatcccaagtatgcaagttgggttcatagatgccatctgcttgcaactgtatgaggccctgacccacgtgtcagaggactgtttccctttgctagatggctgcagaaagaacaggcagaaatggcaggcccttgcagaacagcag

SEQ ID NO: 8440 - DNA, 978 bp, Artificial Sequence
  source: /note="Description of Artificial Sequence: Synthetic Destabilizing Domain (DD)"
gaagaaacaagagagctacagtcgttagcggctgctgtggtgccatctgcccagacccttaaaattactgactttagcttcagtgactttgagctgtctgatctggaaacagcactgtgtacaattcggatgtttactgacctcaaccttgtgcagaacttccagatgaaacatgaggttctttgcagatggattttaagtgttaagaagaattatcggaagaatgttgcctatcataattggagacatgcctttaatacagctcagtgcatgtttgctgctctaaaagcaggcaaaattcagaacaagctgactgacctggagatacttgcattgctgattgctgcactaagccacgatttggatcaccatggtgtgaataactcttacatacagcgaagtgaacatccacttgcccagctttactgccattcaatcatggaacaccatcattttgaccagtgcctgatgattcttaatagtccaggcaatcagattctcagtggcctctccattgaagaatataagaccacgttgaaaataatcaagcaagctattttagctacagacctagcactgtacattaagaggcgaggagaattttttgaacttataagaaaaaatcaattcaatttggaagatcctcatcaaaaggagttgtttttggcaatgctgatgacagcttgtgatctttctgcaattacaaaaccctggcctattcaacaacggatagcagaacttgtagcaactgaattttttgatcaaggagacagagagagaaaagaactcaacatagaacccactgatctaatgaacagggagaagaaaaacaaaatcccaagtatgcaagttgggttcatagatgccatctgcttgcaactgtatgaggccctgacccacgtgtcagaggactgtttccctttgctagatggctgcagaaagaacaggcagaaatggcaggcccttgcagaacagcag

SEQ ID NO: 8441 - DNA, 978 bp, Artificial Sequence
  source: /note="Description of Artificial Sequence: Synthetic Destabilizing Domain (DD)"
gaagaaacaagagagctacagtcgttagcggctgctgtggtgccatctgcccagacccttaaaattactgactttagcttcggtgactttgagctgtctgatctggaaacagcactgtgtacaattcggatgtttactgacctcaaccttgtgcagaacttccagatgaaacatgaggttctttgcagatggattttaagtgttaagaagaattatcggaagaatgttgcctatcataattggagacatgcctttaatacagctcagtgcatgtttgctgctctaaaagcaggcaaaattcagaacaagctgactgacctggagatacttgcattgctgattgctgcactaagccacgatttggatcaccgtggtgtgaataactcttacatacagcgaagtgaacatccacttgcccagctttactgccattcaatcatggaacaccatcattttgaccagtgcctgatgattcttaatagtccaggcaatcagattctcagtggcctctccattgaagaatataagaccacgttgaaaataatcaagcaagctattttagctacagacctagcaccgtacattaagaggcgaggagaattttttgaacttataagaaaaaatcaattcaatttggaagatcctcatcaaaaggagttgtttttggcaatgctgatgacagcttgtgatctttctgcaattacaaaaccctggcctattcaacaacggatagcagaacttgtagcaactgaattttttgatcaaggagacagagagagaaaagaactcaacatagaacccactgatctaatgaacagggagaagaaaaacaaaatcccaagtatgcaagttgggttcatagatgccatctgcttgcaactgtatgaggccctgacccacgtgtcagaggactgtttccctttgctagatggctgcacaaagaacaggcagaaatggcaggcccttgcagaacagcag

SEQ ID NO: 8442 - DNA, 978 bp, Artificial Sequence
  source: /note="Description of Artificial Sequence: Synthetic Destabilizing Domain (DD)"
gaagaaacaagagagctacagtcgttagcggctgctgtggtgccatctgcccagacccttaaaattactgactttagcttcagtgactttgagctgtctgatctggaaacagcactgtgtacaattcggatgtttactgacctcaaccttgtgcagaacttccagatgaaacatgaggttctttgcagatggattttaagtgttaagaagaattatcggaagaatgttgcctatcataattggagacatgcctttaatacagctcagtgcatgtttgctgctctaaaagcaggcaaaattcagaacaagctgactgacctggagatacttgcattgctgattgctgcactaagccacgatttggatcaccgtggtgtgaataactcttacatacatcgaagtgaacatccacttgcccagctttactgccattcaatcatggaacaccatcattttgaccagtgcctgatgattcttaatagtccaggcaatcagattctcagtggcctctccattgaagaatataagaccacgttgaaaataatcaagcaagctattttagctacagacctagcactgtacattaagaggcgaggagaattttttgaacttataagaaaaaatcaattcaatttggaagatcctcatcaaaaggagttgtttttggcaatgctgatgacagcttgtgatctttctgcaattacaaaaccctggcctattcaacaacggatagcagaacttgtagcaactgaattttttgatcaaggagacagagagagaaaagaactcaacatagaacccactgatctaatgaacagggagaagaaaaacaaaatcccaagtatgcaagttgggttcatagatgccatctgcttgcaactgtatgaggccctgacccacgtgtcagaggactgtttccctttgctagatggctgcagaaagaacaggcagaaatggcaggcccttgcagaacagcag

SEQ ID NO: 8443 - DNA, 978 bp, Artificial Sequence
  source: /note="Description of Artificial Sequence: Synthetic Destabilizing Domain (DD)"
gaagaaacaagagagctacagtcgttagcggctgctgtggtgccatctgcccagacccttaaaattactgactttagcttcagtgactttgagctgtctgatctggaaacagcactgtgtacaattcggatgtttactgacctcaaccttgtgcagaacttccagatgaaacatgaggttctttgcagatggattttaagtgttaagaagaattatcggaagaatgttgcctatcataattggagacatgcctttaatacagctcagtgcatgtttgctgctctaaaagcaggcaaaattcagaacaagctgactgacctggagatacttgcattgctgattgctgcactaagccacgatttggatcaccgtggtgtgaataactcttacatacagcgaagtgaacatccacttgcccagctttactgccattcaatcatggaacaccatcattttgaccagtgcctgatgattcttaatagtccaggcaatcagattctcagtggcctctccattgaagaatataagaccacgttgaaaataatcaagcaagctattttagctacagacctagcactgtacattaagaggcgaggagaattttttgaacttataagaaaaaatcaattcaatttggaagatcctcatcaaaaggagttgtttttggcaatgctgatgacagcttgtgatctttctgcaattacaaaaccctggcctattcaacaacggatagcagaacctgtagcaactgaattttttgatcaaggagacagagagagaaaagaactcaacatagaacccactgatctaatgaacagggagaagaaaaacaaaatcccaagtatgcaagttgggttcatagatgccatctgcttgcaactgtatgaggccctgacccacgtgtcagaggactgtttccctttgctagatggctgcagaaagaacaggcagaaatggcaggcccttgcagaacagcag

SEQ ID NO: 8444 - DNA, 978 bp, Artificial Sequence
  source: /note="Description of Artificial Sequence: Synthetic Destabilizing Domain (DD)"
gaagaaacaagagagctacagtcgttagcggctgctgtggtgccatctgcccagacccttaaaattactgactttagcttcagtgactttgagctgtctgatctggaaacagcactgtgtacaattcggatgtttactgacctcaaccttgtgcagaacttccagatgaaacatgaggttctttgcagatggattttaagtgttaagaagaattatcggaagaatgttgcctatcataattggagacatgcctttaatacagctcagtgcatgtttgctgctctaaaagcaggcaaaattcagaacaagctgactgacctggagatacttgcattgctgattgctgcactaagccacgatttggatcaccgtggtgtgaataactcttacatacagcgaagtgaacatccacttgcccagctttactgccattcaatcatggaacaccatcattttgaccagtgcctgatgattcttaatagtccaggcaatcagattctcagtggcctctccattgaagaatataagaccacgttgaaaataatcaagcaagctattttagctacagacctagcactgtacattaagaggcgaggagaattttttgaacttataagaaaaaatcaattcaatttggaagatcctcatcaaaaggagttgtttttggcaatgctgatgacagcttgtgatctttctgaaattacaaaaccctggcctattcaacaacggatagcagaacttgtagcaactgaattttttgatcaaggagacagagagagaaaagaactcaacatagaacccactgatctaatgaacagggagaagaaaaacaaaatcccaagtatgcaagttgggttcatagatgccatctgcttgcaactgtatgaggccctgacccacgtgtcagaggactgtttccctttgctagatggctgcagaaagaacaggcagaaatggcaggcccttgcagaacagcag

SEQ ID NO: 8445 - DNA, 978 bp, Artificial Sequence
  source: /note="Description of Artificial Sequence: Synthetic Destabilizing Domain (DD)"
gaagaaacaagagagctacagtcgttagcggctgctgtggtgccatctgcccagacccttaaaattactgactttagcttcagtgactttgagctgtctgatctggaatcagcactgtgtacaattcggatgtttactgacctcaaccttatgcagaacttccagatgaaacatgaggttctttgcagatggattttaagtgttaagaagaattatcggaagaatgttgcctatcataattggagacatgcctttaatacagctcagtgcatgtttgctgctctaaaagcaggcaaaattcagaacaagctgactgacctggagatacttgcattgctgattgctgcactaagccacgatttggatcaccgtggtgtgaataactcttacatacagcgaagtgaacatccacttgcccagctttactgccattcaatcatggaacaccatcattttgaccagtgtctgatgattcttaatagtccaggcaatcagattctcagtggcctctccattgaagaatataagaccacgttgaaaataatcaagcaagctattttagcttcagacctagcactgtacattaagaggcgaggagaattttttgaacttataagaaaaaatcaattcaatttggaagatcctcatcaaaaggagttgtttttggcaatgctgatgacagcttgtgatctttctgcaattacaaaaccctggcctattcaacaacggatagcagaacttgtagcaactgaattttttgatcaaggagacagagagagaaaagaactcaacatagaacccactgatctaatgaacagggagaagaaaaacaaaatcccaagtatgcaagttgggttcatagatgccatctgcttgcaactgtatgaggccctgacccacgtgtcagaggactgtttccctttgctagatggctgcagaaagaacaggcagaaatggcaggcccttgcagaacagcag

SEQ ID NO: 8446 - DNA, 978 bp, Artificial Sequence
  source: /note="Description of Artificial Sequence: Synthetic Destabilizing Domain (DD)"
gaagaaacaagagagctacagtcgttagcggctgctgtggtgccatctgcccagacccttaaaattactgactttagtttcagtgactttgagctgtctgatttggaaacagcactgtgtacaattcggatgtttactgacctcaaccttgtgcagaacttccagatgaaacatgaggttctttgcagatggattttaagtgttaagaagaattatcggaagaatgttgcctatcataattggagacatgcctttaatacagctcagtgcatgtttgctgctctaaaagcaggcaaaattcagaacaagctgactgacctggagatacttgcattgctgattgctgcactaagccacgatttggatcaccgtggtgtgaataactcttacatacagcgaagtgaacatccacttgcccagctttactgccattcaatcatggaacaccatcattttgaccagtgcctgatgattcttaatagtccaggcaatcagattctcagtggcctctccattgaagaatataagaccacgttgaaaataatcaagcaagctattttagctacagacctagcactgtacattaagaggcgaggagaattttttgaacttataagaaaaaatctattcaatttggaagatcctcatcaaaaggagttgtttttggcaatgctgatgacagcttgtgatctttctgcaattacaaaaccctggcctattcaacaacggatagcagaacttgtagcaactgaattttttgatcaaggagacagagagagaaaagaactcaacatagaacccactgatctaatgaacagggagaagaaaaacaaaatcccaagtatgcaagttgggttcatagatgccatctgcttgcaactgtatgaggccctgacccacgtgtcagaggactgtttccctttgctagatggctgcagaaagaacaggcagaaatggcaggcccttgcagaacagcag

SEQ ID NO: 8447 - DNA, 978 bp, Artificial Sequence
  source: /note="Description of Artificial Sequence: Synthetic Destabilizing Domain (DD)"
gaagaaacaagagagctacagtcgttagcggctgctgtggtgccatctgcccagacccttaaaattactgactttagcttcagtgactttgagctgtctgatctggaaacagcactgtgtacaattcggatgtttactgacctcaaccttgtgcagaacttccagatgaaacatgaggttctttgcagatggattttaagtgttaagaagaattatcggaagaatgttgcctatcataattggagacatgcctttaatacagctcagtgcatgtttgctgctctaaaagcaggcaaaattcagaacaagctgactgacctggagatacttgcattgctgattgctgcactaagccacgatttggatcaccgtggtgtgaataactcttacatacagcgaagtgaacatccacttgcccagctttactgccattcaatcatggaacaccatcattttgaccagtgcctgatgattcttaatagtccaggcaatcagattctcagtggcctctccattgaagaacataagaccacgttgaaaataatcaagcaagctattttagctacagacctagcactgtacattaagaggcgaggagaattttttgaacttataagaaaaaatcaattcaatttggaagatcctcatcaaaaggagttgtttttggcaatgctgatgacagcttgtgatctttctgcaattacaaaaccctggcctattcaacaacggatagcagaacttgtagcaactgaatttgttgatcaaggagacagagagagaaaagaactcaacatagaacccactgatctaatgaacagggagaagaaaaacaaaatcccaagtatgcaagttgggttcatagatgccatctgcttgcaactgtatgaggccctgacccacgtgtcagaggactgtttccctttgctagatggctgcagaaagaacaggcagaaatggcaggcccttgcagaacagcag

SEQ ID NO: 8448 - DNA, 978 bp, Artificial Sequence
  source: /note="Description of Artificial Sequence: Synthetic Destabilizing Domain (DD)"
gaagaaacaagagagctacagtcgttagcggctgctgtggtgccatctgcccagacccttaaaattactgactttagcttcagtgactttgagctgtctgatctggaaacagcactgtgtacaattcggatgtttactgacctcaaccttgtgcagaacttccagatgaaacatgaggttctttgcagatggattttaagtgttaagaagtattatcggaagaatgttgcctatcataattggagacatgcctttaatacagctcagtgcatgtttgctgctctaaaagcaggcaaaattcagaacaagctgactgacctggagatacttgcattgctgattgctgcactaagccacgatttggatcaccgtggtgtgaataactcttacatacagcgaagtgaacatccacttgcccagctttactgccattcaatcatggaacaccatcattttgaccagtgcctgatgattcttaatagtccaggcaatcagattctcagtggcctctccattgaagaatataagaccacgttgaaaaaaatcaagcaagctattttagctacagacctagcactgtacattaagaggcgaggagaattttttgaacttataagaaaaaatcaattcaatttggaagatcctcatcaaaaggagttgtttttggcaatgctgatgacagcttgtgatctttctgcaattacaaaaccctggcctattcaacaacggatagcagaacttgtagcaactgaattttttgatcaaggagacagagagagaaaagaactcaacatagaacccactgatctaatgaacagggagaagaaaaacaaaatcccaagtatgcaagttgggttcatagatgccatctgcttgcaactgtatgaggccctgacccacgtgtcagaggactgtttccctttgctagatggctgcagaaagaacaggcagaaatggcaggcccttgcagaacagcag

SEQ ID NO: 8449 - DNA, 978 bp, Artificial Sequence
  source: /note="Description of Artificial Sequence: Synthetic Destabilizing Domain (DD)"
gaagaaacaagagagctacagtcgttagcggctgctgtggtgccatctgcccagacccttaaaattactgactttagcttcagtgacattgagctgtctgatctggaaacagcactgtgtacaattcggatgtttactgacctcaaccttgtgcagaacttccagatgaaacatgaggttctttgcagatggattttaagtgttaagaagaattatcggaagaatgttgcctatcataattggagacatgcctttaatacagctcagtgcatgtttgctgctctaaaagcaggcaaaattcagaacaagctgactgacctggagatacttgcattgctgattgctgcactaagccacgatttggatcaccgtggtgtgaattactcttacatacagcgaagtgaacatccacttgcccagctttactgccattcaatcatggaacaccatctttttgaccagtgcctgatgattcctaatagtccaggcaatcagattctcagtggcctctccattgaagaatataagaccacgttgaaaataatcaagcaagctattttagctacagacctagcactgtacattaagaggcgaggagaatttattgaacttataagaaaaaatcaattcaatttggaagatcctcatcaaaaggagttgtttttggcaatgctgatgacagcttgtgatctttctgcaattacaaaaccctggcctattcaacaacggatagcagaacttgtagcaactgaattttttgatcaaggagacagagagagaaaagaactcaacatagaacccactgatctaatgaacagggagaagaaaaacaaaatcccaagtatgcaagttgggttcatagatgccatctgcttgcaactgtatgaggccctgacccacgtgtcagaggactgtttccctttgctagatggctgcagaaagaacaggcagaaatggcaggcccttgcagaacagcag

SEQ ID NO: 8450 - DNA, 978 bp, Artificial Sequence
  source: /note="Description of Artificial Sequence: Synthetic Destabilizing Domain (DD)"
gaagaaacaagagagctacagtcgttagcggctgctgtggtgccatctgcccagacccttaaaattactgactttagcttcagtgactttgagctgtctgatctggaaacagcactgtgtacaattcggatgtttactgacctcaaccttgtgcagaacttccagatgaaacatgaggttctttgcagatggattttaagtgttaagaagaattatcggaagaatgttgcctatcataattggagacatgcctttaatacagctcagtgcatgtttgctgctctaaaagcaggcaaaattcagaacaagctgactgacctggagatacttgcattgctgattgctgcactaagccacgatttggatcaccgtggtgtgaataactcttacatacagcgaagtgaacatccacttgcccagctttactgccattcaatcatggaacaccatcattttgaccagtgcctgatgattcttaatagtccaggcaatcagattctcagtggcctctccattgaagaatataagaccacgttgaaaataatcaagcaagctattttagttacagacctagcactgtacattaagaggcgaggagaattttttgaacttataagaaaaaatcaattcaatttggaagatcctcatcaaaaggagttgttattggcaatgctgatcacagcttgtgatctttctgcaattacaaaaccctggcctattcaacaacggatagcagaacttgtagcaactgaattttttgatcaaggagacagagagagaaaagaactcaacatagaacccactgatctaatgaacagggagaagaaaaacaaaatcccaagtatgcaagttgggttcatagatgccatctgcttgcaactgtatgaggccctgacccacgtgtcagaggactgtttccctttgctagatggctgcagaaagaacaggcagaaatggcaggcccttgcagaacagcag

SEQ ID NO: 8451 - DNA, 978 bp, Artificial Sequence
  source: /note="Description of Artificial Sequence: Synthetic Destabilizing Domain (DD)"
gaagaaacaagagagctacagtcgttagcggctgctgtggtgccatctgcccagacccttaaaattactgactttagcttcagtgactttgagctgtctgatctggaaacagcactgtgtacaattcggatgtttactgatctcaaccttgtgcagaacttccagatgaaacatgagattctttgcagatggattttaagtgttaagaagaattatcggaagaatgttgcctatcataattggagacatgcctttaatacagctcagtgcatgtttgctgctctaaaagcaggcaaaattcagaacaagctgactgacctggagatacttgcattgctgattgctgcactaagccacgatttggatcaccgtggtgtgaataactcttacatacagcgaagtgaacatccacttgcccagctttactgccattcaatcatggaacaccatcattttgaccagtgcctgatgattcttaatagtccaggcaatcagattctcagtggcctctccattgaagaatataagaccacgttgaaaataatcaagcaagctattttagctacagacctagcactgtacattaagaggcgaggagaattttttgaacttataagaaaaaatcaattcaatttggaagatcctcatcaaaaggagttgtttttggcaatgctgatgacagcttgtgatctttctgcaattacaaaaccctggcctattcaacaacggatagcagaacttgtagcaactgaattttttgatcaaggagacagagagagaaaagaactcaacatagaacccactgatctaatgaacagggagaagaaaaacaaaatcccaagtatgcaagttgggttcatagatgccatctgcttgcaactgtatgaggccctgacccacgtgtcagaggactgtttccctttgctagatggctgcagaaagaacaggcagaaatggcaggcccttgcagaacagcag

SEQ ID NO: 8452 - DNA, 978 bp, Artificial Sequence
  source: /note="Description of Artificial Sequence: Synthetic Destabilizing Domain (DD)"
gaagaaacaagagagctacagtcgttagcggctgctgtggtgccatctgcccagacccttaaaattactgactttagcttcagtgactttgagctgtctgatctagaaacagcactgtgtacaattcggatgtttactgacctcaaccttgtgcagaacttccagatgaaacgtgaggttctttgcagatggattttaagtgttaagaagaattatcggaagaatgttgcctatcataattggagacatgcctttaatacagctcagtgcatgtttgctgctctaaaagcaggcaaaattcagaacaagctgactgacctggagatacttgcattgctgattgctgcactaagccacgatttggatcaccgtggtgtgaataactcttacatacagcgaagtgaacatccacttgcccagctttactgccattcaatcatggaacaccatcattttgaccagtgcctgatgattcttaatagtccaggcaatcagattctcagtggcctctccattgaagaatataagaccacgttgaaaataatcaagcaagctattttagctacagacctagcactgtacattaagaggcgaggagaattttttgaacttataagaaaaaatcaattcaatttggaagatcctcatcaaaaggagttgtttttggcaatgctgatgacagcttgtgatctttctgcaattacaaaaccctggcctattcaacaacggatagcagaacttgtagcaactgaattttttgatcaaggagacagagagagaaaagaactcaacatagaacccactgatctaatgaacagggagaagaaaaacaaaatcccaagtatgcaagttgggttcatagatgccatctgcttgcaactgtatgaggccctgacccacgtgtcagaggactgtttccctttgctagatggctgcagaaagaacaggcagaaatggcaggcccttgcagaacagcag

SEQ ID NO: 8453 - DNA, 978 bp, Artificial Sequence
  source: /note="Description of Artificial Sequence: Synthetic Destabilizing Domain (DD)"
gaagaaacaagagagctacagtcgttagcggctgctgtggtgccatctgcccagacccttaaaattactgactttagcttcagtgactttgagctgtctgatctggaaacagcactgtgtacaattcggatgtttactgacctcaaccttgtgcagaacttccagatgaaacatgaggttctttgcagatggattttaagtgttaagaagaattatcggaagaatgttgcctatcataattggagacatgcctttaatacagctcagtgcatgtttgctgctctaaaagcaggcaaaattcagaacaagctgactgacctggagatacttgcattgctgattgctgcactaagccacgatttggatcaccgtggtgtgaataactcttacatacagcgaagtgaacatccacttgcccagctttactgccattcaatcatggaacaccatcattttgaccagtgcctgatgattcttaatagtccaggcaatcagattctcagtggcctctccattgaagaatataagaccacgttgaaaataatcaagcaagctattttagctacagacctagcactgtacattaagaggcgaggagaattttttgaacttataagaaaaaatcaattcaatttggaagatcctcatcaaaaggagttgtttttggcaatgctgatgacagcttgtgatctttctgcaattacaaaaccctggcctattcaacaacggatagcagaacttgtagcaactgaattttttgatcaaggagacagagagagaaaagaactcaacatagaacccactgatctaatgaacagggagaagaaaaacaaaatcccaagtatgcaagttgggttcatagatgccatctgcttgcaactgtatgaggccctgacccacgtgtcagaggactgtttccctttgctagatggctgcagaaagaacaggcagaaatggcaggcccttgcagtacagcag

SEQ ID NO: 8454 - DNA, 978 bp, Artificial Sequence
  source: /note="Description of Artificial Sequence: Synthetic Destabilizing Domain (DD)"
gaagaaacaagagagctacagtcgttagcggctgctgtggtgccatctgcccagacccttaaaattactgactttagcttcagtgactttgagctgtctgatctggaaacagcactgtgtacaattcggatgtttactgacctcaaccttgtgcagaacttccagatgaaacatgaggttctttgcagatggattttaagtgttaagaagaattatcggaagaatgttgcctatcataattggagacatgcctttaatacagctcagtgcatgttcgctgctctaaaagcaggcaaaattcagaacaagctgactgacctggagatacttgcattgctgattgctgcactaagccacgatttggatcaccgtggtgtgaataactcttacatacagcgaagtgaacatccacttgcccagctttactgccattcaatcatggaacaccatcattttgaccagtgcctgatgattcttaatagtccaggcaatcagattctcagtggcctctccattgaagaatataagaccacgttgaaaataatcaagcaagctattttagctacagacctagcactgtacattaagaggcgaggagaattttttgaacttataagaaaaaatcaattcaatttggaagatcctcatcaaaaggagttgtttttggcaatgctgatgacagcttgtgatctttctgcaattacaaaaccctggcctattcaacaacggatagcagaacttgtagcaattgaattttttgatcaaggagacagagagagaaaagaactcaacatagaacccactgatctaatgaacagggagaagaaaaacaaaatcccaagtatgcaagttgggttcatagatgccatctgcttgcaactgtatgaggccctgacccacgtgtcagaggactgtttccctttgctagatggctgcagaaagaacaggcagaaatggcaggcccttgcagaacagcag

SEQ ID NO: 8455 - DNA, 978 bp, Artificial Sequence
  source: /note="Description of Artificial Sequence: Synthetic Destabilizing Domain (DD)"
gaagaaacaagagagctacagttgttagcggctgctgtggtgccatctgcccagacccttaaaattactgactttagcttcagtgactttgagctgtctgatctggaaacagcactgtgtacaattcggatgtttactgacctcaaccttgtgcagaacttccagatgaaacatgaggttctttgcagatggattttaagtgttaagaagaattatcggaagaatgttgcctatcataattggagacatgcctttaatacagctcagtgcatgtttgctgctctaaaagcaggcaaaattcagaacaagctgactgacctggagatacttgcactgctgattgctgcactaagccacgatttggatcaccgtggtgtgaataactcttacatacagcgaagtgaacatccacttgcccagctttactgccattcaatcatggaacaccatcattttgaccagtgcctgatgattcttaatagtccaggcaatcagattctcagtggcctctccattgaagtatataagaccacgttgaaaataatcaagcaagctattttagctacagacctagcactgtacattaagaggcgaggagaattttttgaacttataagaaaaaatcaattcaatttggaagatcctcatcaaaaggagttgtttttggcaatgctgatgacagcttgtgatctttctgcaattacaaaaccctgtcctattcaacaacggatagcagaacttgtagcaactgaattttttgatcaaggagacagagagagaaaagaactcaacatagaacccactgatctaatgaacagggagaagaaaaacaaaatcccaagtatgcaagttgggttcatagatgccatctgcttgcaactgtatgaggccctgacccacgtgtcagaggactgtttccctttgctagatggctgcagaaagaacaggcagaaatggcaggcccttgcagaacagcag

SEQ ID NO: 8456 - DNA, 978 bp, Artificial Sequence
  source: /note="Description of Artificial Sequence: Synthetic Destabilizing Domain (DD)"
gaagaaacaagagagctacagtcgttagcggctgctgtggtgccatctgcccagacccttaaaattactgactttagcttcagtgactttgagctgtctgatctggaaacagcactgtgtacaattcggatgtttactgacctcaaccttgtgcagaacttccagatgaaacatgaggttctttgcagatggattttaagtgttaagaagaattatcggaagaatgttgcctatcataattggagacatgcctttaatacagctcagtgcatgtttgctgctctaaaagcaggcaaaattcagaacaagctgactgacctggagatacttgcattgctgattgctgcactaagccacgatttggatcaccgtggtgtgaataactcttacatacagcgaagtgaacatccacttgcccagctttactgccattcaatcatggaacaccatcattttgaccagtgcctgatgattcttaatagtccaggcaatcagtttctcagtggcctctccattgaagaatataagaccacgttgaaaataatcaagcaagctattttagctacagacctagcactgtacattaagaggcgaggagaattttttgaacttataagaaaaaatcaattcaatttggaagatcctcatcaaaaggagttgttcttggcaatgctgatgacagcttgtgatctttctgcaattacaaaaccctggcctattcaacaacggatagcagaacttgtagcaactgaattttttgatcaaggagacagagagagaaaaggactcaacatagaacccactgatctaatgaacagggagaagaaaaacaaaatcccaagtatgcaagttgggttcatagatgccatctgcttgcaactgtatgaggccctgacccacgtgtcagaggactgtttccctttgctagatggctgcagaaagaacaggcagaaatggcaggcccttgcagaacagcag

SEQ ID NO: 8457 - DNA, 978 bp, Artificial Sequence
  source: /note="Description of Artificial Sequence: Synthetic Destabilizing Domain (DD)"
gaagaaacaagagagctacagtcgttagcggctgctgtggtgccatctgcccagacccttaaaattactgactttagcttcagtgactttgagctgtctgatctggaaacagcactgtgtacaattcggatgtttactgacctcaaccttgtgcagaacttccagatgaaacatgaggttctttgcagatggattttaagtgttaagaagaattatcggaagaatgttgcctatcataattggagacatgcctttaatacagctcagtgcatgtttgctgctctaaaagcaggcaaaattcagaacaagctgactgacctggagatacttgcattgctgattgctgcactaagccacgatttggatcaccgtggtgtgaataactcttacatacagcgaagtgaacatccacttgcccagctttactgccattcaatcatggaacaccatcattttgaccagtgcctgatgattcttaatagtccaggcaatcagattctcagtggcctctccattgaagaatataagaccacgttgaaaataatcaagcaagctattttagctacaggcctagcactgtacattaagaggcgaggagaattttttgaacttataagaaaaaatcaattcaatttggaagatcctcatcaaaaggagttgtttttggcaatgctgatgacagcttgtgatctttctgcaattacaaaaccctggcctattcaacaacggatagcagaacttgtagcaactgaattttttgatcaaggagacagagagagaaaagaactcaacatagaacccactgatctaatgaacagggagaagaaaaacaaaatcccaagtatgcaagttgggttcatagatgccatctgcttgcaactgtatgaggccctgacccacgtgtcagaggactgtttccctttgctagatggctgcagaaataacaggcagaaatggcaggcccttgcagaacagcag

SEQ ID NO: 8458 - DNA, 978 bp, Artificial Sequence
  source: /note="Description of Artificial Sequence: Synthetic Destabilizing Domain (DD)"
gaagaaacaagagagctacagtcgttagcggctgctgtggtgccatctgcccagacccttaaaattactgactttagcttcagtgactttgagctgtctgatctggaaacagcactgtgtacaattcggatgtttactgacctcaaccttgtgcagaacttccagatgaaacatgaggttctttgcagatggattttaagtgttaagaagaattatcggaagaatgttgcctatcataattggagacatgcctttaatacagctcagtgcatgtttgctgctctaaaagcaggcaaaattcagaacaagctgactgacctggagatacttgcattgctgattgctgcactaagccacgatttggatcaccgtggtgtgaataactcttacatacagcgaagtgaacatccacttgcccagctttactgccattcaatcatggaacaccatcattttgaccagtgcctgatgattcttaatagtccaggcaatcagattctcagtggcctctccattgaagaatataagaccatgttgaaaataatcaagcaagctattttagctacagacctagcactgtacattaagaggcgaggagaattttttgaacttataagaaaaaatcaattcaatttggaagatcctcatcaaaaggagttgtttttggcaatactgatgacagcttgtgatctttctgcaattacaaaaccctggcctattcaacaacggatagcagaacttgtagcaactgaattttttgatcaaggagacagagagagaaaagaactcaacatagaacccactgatctaatgaacagggagaagaaaaacaaaatcccaagtatgcaagttgggttcatagatgccatctgcttgcaactgtatgaggccctgacccacgtgtcagaggactgtttccctttgctagatggctgcagaaagaacaggcagaaatggcaggcccttgcagaacggcag

SEQ ID NO: 8459 - DNA, 978 bp, Artificial Sequence
  source: /note="Description of Artificial Sequence: Synthetic Destabilizing Domain (DD)"
gaagaaacaagagagctacagtcgttagcggctgctgtggtgccatctgcccagacccttaaaagtactgactttagcttcagtgactttgagctgtctgatctggaaacagcactgtgtacaattcggatgtttactgacctcaaccttgtgcagaacttccagatgaaacatgaggttctttgcagatggattttaagtgttaagaagaattatcggaagaatgttgcctatcataattggagacatgcctttaatacagctcagtgcatgtttgctgctctaaaagcaggcaaaattcagaacaagctgactgacctggagatacttgcattgctgattgctgcactaagccacgatttggatcaccgtggtgtgaataactcatacatacagcgaagtgaacatccacttgcccagctttactgccattcaatcatggaacaccatcattttgaccagtgcctgatgattcttaatagtccaggcaatcagattctcagtggcctctccattgaagaatataagaccacgttgaaaataatcaagcaagctattttagctacagacctagcactgtacattaagaggcgaggagaattttttgaacttataagaaaaaatcaattcaatttggaagatcctcatcaaaaggagttgtttttggcaatgctgatgacagcttgtgatctttctgcaattacaaaaccctggcctattcaacaacggatagcagaacttgtagcaactgaattttttgatcaaggagacagagagagaaaagatctcaacatagaacccactgatctaatgaacagggagaagaaaaacaaaatcccaagtatgcaagttgggttcatagatgccatctgcttgcaactgtatgaggccctgacccacgtgtcagaggactgtttccctttgctagatggctgcagaaagaacaggcagaaatggcaggcccttgcagaacagcag

SEQ ID NO: 8460 - DNA, 978 bp, Artificial Sequence
  source: /note="Description of Artificial Sequence: Synthetic Destabilizing Domain (DD)"
gaagaaacaagagagctacagtcgttagcggctgctgtggtgccatctgcccagacccttaaaattactgactttagcttcagtgactttgagctgtctgatctggaaacagcactgtgtacaattcggatgtttactgacctcaaccttgtgcagaacttccagatgaaacatgaggttctttgcagatggattttaagtgttaagaagaattatcggaagaatgttgcctatcataattggagacatgcctttaatacagctcagtgcatgtttgctgctctaaaagcaggcaaaattcagaacaagctgactgacctggagatacttgcattgctgattgctgcactaagccacgatttggatcaccgtggtgtgaataactcttacatacagcgaagtgaacatccacttgcccagctttactgccattcaagcatggaacaccaccattttgaccagtgcctgatgattcttaatagtccaggcaatcagattctcagtggcctctccattgaagaatataagaccacgttgaaaataatcaagcaagctattttagctacagacctagcactgtacattaagaggcgaggagaattttttgaacttataagaaaaaatcaattcaatttggaagatcctcatcaaaaggagttgtttttggcaatgctgatgacagcttgtgatctttctgcaattacaaaaccctggcctattcaacaacggatagcagaacttgtagcaactgaattttttgatcaaggagacagagagagaaaagaactcaacatagaacccactgatctaatgaacagggagaagaaaaacaaaatcccaagtatgcaagttgggttcatagatgccatctgcttgcaactgtatgaggccctgacccacgtgtcagaggactgtttccctttgctagatggctgcagaaagaacaggcagaaatggcaggcccttgcagaacagcag

SEQ ID NO: 8461 - DNA, 978 bp, Artificial Sequence
  source: /note="Description of Artificial Sequence: Synthetic Destabilizing Domain (DD)"
gaagaaacaagagagctacagtcgttagcggctgctgtggtgccatctgcccagacccttaaaattactgactttagcttcagtgactttgagctgtctgatctggaaacagcactgtgtacaattcggatgtttactgacctcaaccttgtgcagaacttccagatgaaacatgaggttctttgcagatggattttaagtgttaagaagaattatcggaagaatgttgcctatcttaattggagacatgcctttaatacagctcagtgcatgtttgctgctctaaaagcaggcaaaattcagaacaagctgactgacctggagatacttgcattgctgattgctgcactaagccacgatttggatcaccgtggtgtgaataactcttacatacagcgaagtgaacatccacttgcccagctttactgccattcaatcatggaacaccatcattttgaccagtgcctgatgattcttaatagtccaggcaatcagattctcagtggcctctccattgaagaatataagaccacgttgaaaataatcaagcaagctattttagctacatacctagcactgtacattaagaggcgaggagaattttttgaacttataagaaaaaatcaattcaatttggaagatcctcatcaaaaggagttgtatttggcaatgctgatgacagcttgtgatctttctgcaattacaaaaccctggcctattcaacaacggatagcagaacttgtagcaactgaattttttgatcaaggagacagagagagaaaagaactcaacatagaacccactgatctaatgaacagggagaagaaaaacaaaatcccaagtatgcaagttgggttcatagatgccatctgcttgcaactgtatgaggccctgacccacgtgtcagaggactgtttccctttgctagatggctgcagaaagaacaggcagaaatggcaggcccttgcagaacagcag

SEQ ID NO: 8462 - DNA, 978 bp, Artificial Sequence
  source: /note="Description of Artificial Sequence: Synthetic Destabilizing Domain (DD)"
gaagaaacaagagaactacagtcgttagcggctgctgtggtgccatctgcccagacccttaaaattactgactttagcttcagtgactttgagctgtctgatctggaaacagcactgtgtacaattcggatgtttactgacctcaaccttgtgcagaacttccagatgaaacatgaggttctttgcagatggattttaagtgttaagaagaattatcggaagaatgttacctatcataattggagacatgcctttaatacagctcagtgcatgtttgctgctctaaaagcaggcaaaattcagaacaagctgactgacctggagatacttgcattgctgattgctgcactaagccacgatttggatcaccgtggtgtgaataactcttacatacagcgaagtgaacatccacttgcccagctttactgccattcaatcatggaacaccatcattttgaccagtgcctgatgattcttaatagtccaggcaatcagattctcagtggcctctccattgaagaatataagaccacgttgaaaataatcaagcaagctattttagctacagacctagcactgtacattaagaggcgaggagaattttttgaacttataagaaaaaatcaattcaatttggaagatcctcatcaaaaggagttgtttttggcaatgctgatgacagcttgtgatctttctgcaattacaaaaccctggcctattcaacaacggatagcagaacttgtagcaactgaattttttgatcaaggagacagagagagaaaagaactcaacatagaacccactgatctaatgaacagggagaagaaaaacaaaatcccaagtatgcaagttgggttcatagatgccatctgcttgcaactgtatgaggccctgacccacgtgtcagaggactgtttccctttgctagatggctgcagaaagaacaggcagaaatggcaggcccttgcagaacagcag

SEQ ID NO: 8463 - DNA, 978 bp, Artificial Sequence
  source: /note="Description of Artificial Sequence: Synthetic Destabilizing Domain (DD)"
gaagaaacaagagagctacagtcgttagcggctgctgtggtgccatctgcccagacccttaaaattactgactttagcttcagtgactttgagctgtctgatctggaaacagcactgtgtacaattcggatgtttactgacctcaaccttgtgcagaacttccagatgaaacatgaggttctttgcagatggattttaagtgttaagaagaattatcggaagaatgttgcctatcataattggagacatgcctttaatacagctcagtgcatgtttgctgctctaaaagcaggcaaaattcagaacaagctgactgacctggagatacttgcattgctgattgctgcactaagccacgatttggatcaccgtggtgtgagtaactcttacatacagcgaagtgaacatccacttgcccaactttactgccattcaatcatggaacaccatcattttgaccagtgcctgatgattcttaatagtccaggcaatcagattctcagtggcctctccattgaagaatataagaccacgttgaaaataatcaagcaagctattttagctacagacctagcactgtacattaagaggcgaggagaattttttgaacttataagaaaaaatcaattcaatttggaagatcctcatcaaaaggaattgtttttggcaatgctgatgacagcttgtgatctttctgcaattacaaaaccctggcctattcaacaacggatagcagaacttgtagcaactgaattttttgatcaaggagacagagagagaaaagaactcaacatagaacccactgatctaatgaacagggagaagaaaaacaaaatcccaagtatgcaagttgggttcatagatgccatctgcttgcaactgtatgaggccctgacccacgtgtcagaggactgtttccctttgctagatggctgcagaaagaacaggcagaaatggcaggcccttgcagaacagcag

SEQ ID NO: 8464 - DNA, 978 bp, Artificial Sequence
  source: /note="Description of Artificial Sequence: Synthetic Destabilizing Domain (DD)"
gaagaaacaagagagctacagtcgttagcggctgctgtggtgccatctgcccagacccttaaaattactgactttagcttcagtgactttgagctgtctgatatggaaacagcactgtgtacaattcggatgtttactgacctcaaccttgtgcagaacttccagatgaaacatgaggttctttgcagatggattttaagtgttaagaagaattatcggaagaatgttgcctatcataattggagacatgcctttaatacagctcagtgcatgtttgctgctctaaaagcaggcaaaattcagaacaagctgactgacctggagatacttgcattgctgattgctgcactaagccacgatttggatcaccgtggtgtgaataactcttacatacagcgaagtgaacatccacttgcccagctttactgccattcaatcatggaacaccatcattttgaccagtgcctgatgattcttaatagtccaggcaatcagattctcagtggcctctccattgaagaatataagaccacgttgaaaataatcaagcaagctattttagctacagacctagcactgtacattaagaggcgaggagaattttttgaacttataagaaaaaatcaattcaatttggaagatcctcatcaaaaggagttgtttttggcaatgctgatgacagcttgtgatctttctgcaattacaaaaccctggcctattcaacaacggatagcagaacttgtagcaactgaattttttgatcaaggagacagagagagaaaagaactcaacatagaacccactgatctaatgaacagggagaagaaaaacaaaatcccaagtatgcaagttgggttcatagatgccatctgcttgcaactgtatgaggccctgagccacgtgtcagaggactgtttccctttgctagatggctgcagaaagaacaggcagaaatggcaggcccttgcagaacagcag

SEQ ID NO: 8465 - DNA, 978 bp, Artificial Sequence
  source: /note="Description of Artificial Sequence: Synthetic Destabilizing Domain (DD)"
gaagaaacaagagagctacagtcgttagcggctgctgtggtgccatctgcccagacccttaaaattactgactttagcttcagtgactttgagctgtctgatctggaaacagcactgtgtacaattcggatgtttactgacctcaaccttgtgcagaacttccagatgaaacatgaggttctttgcagatggattttaagtgttaagaagaattatcggaagaatgttgcctatcataattggagacatgcctttaatacagctcagtgcatgtttgctgctctaaaagcaggcaaaattcagaacaagctgactgacctggagatacttgcattgctgattgctgcactaagccacgatttggatcaccgtggtgtgaataactcttacatacagcgaagtgaacatccacttgcccagctttactgccattcaatcatggaacaccatcattttgaccagtgcctgatgattcttaatagtccaggcaatcagattctcagtggcctctccattgaagaatataagaccacgttgaaaataatcaagcaagctattttagctacagacctagcactgtacattaagaggcgaggagaattttttgaacttataagaaaaaatcaattcaatttggaagatcctcatcaaaaggagttgtttttggcaatgctgatgacagcttgtgatctttctgcaaatacaaaaccctggcctattcaacaacggatagcagaacttgtagcaactgaattttttgatcaaggagacagagagagaaaagaactcaacatagaacccactgatctaatgaacagggagaagaaaaacaaaatcccaagtatgcaagttgggttcatagatgccatctgcttgcaactgtatgaggccctgacccacgtgtcagaggactgtttccctttgctagatggctgcagaaagaacaggcagaaatggcaggcccttgcagaacagcag

SEQ ID NO: 8466 - DNA, 978 bp, Artificial Sequence
  source: /note="Description of Artificial Sequence: Synthetic Destabilizing Domain (DD)"
gaagaaacaagagagctacagtcgttagcggctgctgtggtgccatctgcccagacccttaaaattactgactttagcttcagtgactttgagctgtctgatctggaaacagcactgtgtacaattcggatgtttactgacctcaaccttgtgcagaacttccagatgaaacatgaggttctttgcagatggattttaagtgttaagaagaattattggaagaatgttgcctatcataattggagacatgcctttaatacagctcagtgcatgtttgctgctctaaaagcaggcaaaattcagaacaagctgactgacctggagatacttgcattgctgattgctgcactaagccacgatttggatcaccgtggtgtgaataactcttacatacagcgaagtgaacatccacttgcccagctttactgccattcaatcatggaacaccatcattttgaccagtgcctgatgattcttaatagtccaggcaatcagattctcagtggcctctccattgaagaatataagaccacgttgaaaataatcaagcaagctattttagctacagacctagcactgtacattaagaggcgaggagaattttttgaacttataagaaaaaatcaattcaatttggaagatcctcatcaaaaggagttgtttttggcaatgctgatgacagcttgtgatctttctgcaattacaaaaccctggcctattcaacaacggatagcagaacttgtagcaactgaattttttgatcaaggagacagagagagaaaagaactcaacatagaacccacagatctaatgaacagggagaagaaaaacaaaatcccaagtatgcaagttgggttcatagatgccatctgcttgcaactgtatgaggccctgacccacgtgtcagaggactgtttccctttgctagatggctgcagaaagaacaggcagaaatggcaggcccttgcagaacagcag

SEQ ID NO: 8467 - DNA, 978 bp, Artificial Sequence
  source: /note="Description of Artificial Sequence: Synthetic Destabilizing Domain (DD)"
gaagaaacaagagagctacagtcgttagcggctgctgtggtgccatctgcccagacccttaaaattactgactttagcttcagtgactttgagctgtctgatctggaaacagcactgtgtacaattcggatgtttactgacctcaaccttgtgcagaacttccagatgaaacatgaggttctttgcagatggattttaagtgttaagaagaattatcggaagaatgttgcctatcataattggagacatgcctttagtacagctcagtgcatgtttgctgctctaaaagcaggcaaaattcagaacaagctgactgacctggagatacttgcattgctgattgctgcactaagccacgatttggatcaccgtggtgtgaataactcttacatacagcgaagtgaacatccacttgcccagctttactgccattcaatcatggaacaccatcattttgaccagtgcctgatgattcttaatagtccaggcaatcagattctcagtggcctctccattgaagaatataagaccacgttgaaaataatcaagcaagctattttagctacagacctagcactgtacattaagaggcgaggagaattttttgaacttataagaaaaaatcaattcaatttggaagatcctcatcaaaaggagttgtttttggcaatgctgatgacagcttgtgatctttctgcaattacaaaaccctggcctattcaacaacggatagcagaacttgtagcaactgaattttttgatcaaggagacagagagagaaaagaactcaacatagaacccactgatctaatgaacagggagaagaaaaacaaaatcccaagtatgcaagttgggttcatagatgccatctgcttgcaactgtatgaggccctgacccacgtgtcagaggactgtttccctttgctagatggctgcagaaagaacaggcagaaatggcaggcccttgcagaacagcag

SEQ ID NO: 8468 - DNA, 978 bp, Artificial Sequence
  source: /note="Description of Artificial Sequence: Synthetic Destabilizing Domain (DD)"
gaagaaacaagagagctacagtcgttagcggctgctgtggtgccatctgcccagacccgtaaaattactgactttagcttcagtgactttgagctgtctgatctggaaacagcactgtgtacaattcggatgtttactgacctcaaccttgtgcagaacttcgagatgaaacatgaggttctttgcagatggattttaagtgttaagaagaattatcggaagaatgttgcctatcataattggagacatgcctttaatacagctcagtgcatgtttgctgctctaaaagcaggcaaaattcagaacaagctgactgacctggagatacttgcattgctgattgctgcactaagccacgatttggatcaccgtggtgtgaataactcttacatacagcgaagtgaacatccacttgcccagctttactgccattcaatcatggaacaccatcattttgaccagtgcctgatcattcttaatagtccaggcaatcagattctcagtggcctctccattgaagaatataagaccacgttgaaaataatcaagcaagctattttagctacagacctagcactgtacattaagaggcgaggagaattttttgaacttataagaaaaaatcaattcaatttggaagatcctcatcaaaaggagttgtttttggcaatgctgatgacagcttgtgatctttctgcaattacaaaaccctggcctattcaacaacggatagcagaacttgtagcaactgaattttttgatcaaggagacagagagagaaaagaactcaacatagaacccactgatctaatgaacagggagaagaaaaacaaaatcccaagtatgcaagttgggttcatagatgccatctgcttgcaactgtatgaggccctgacccacgtgtcagaggactgtttccctttgctagatggctgcagaaagaacaggcagaaatggcaggcccttgcagaacagcag

SEQ ID NO: 8469 - DNA, 978 bp, Artificial Sequence
  source: /note="Description of Artificial Sequence: Synthetic Destabilizing Domain (DD)"
gaagaaacaagagagctacagtcgttagcggctgctgtggtgccatctgcccagacccttaaaattactgactttagcttcagtgactttgagctgtctgatctggaaacagcactgtgtacaattcggatgtttactgacctcaaccttgtgcagaacttccagatgaaacatgaggttctttgcagatggattttaagtgttaagaagaattatcggaagaatgttgcctatcataatcggagacatgcctttaatacagctcagtgcatgtttgctgctctaaaagcaggcaaaattcagaacaagctgactgacctggagatacttgcattgctgattgctgcactaagccacgatttggatcaccgtggtgtgaataactcttacatacagcgaagtgaacatccacttgcccagctttactgccattcaatcatggaacaccatcattttgaccagtgcctgatgattcttaatagtccaggcaatcagattctcagtggcctctccattgaagaatataagaccacgttgaaaataatcaagcaagctattttagctagagacctagcactgtacattaagaggcgaggagaattttttgaacttataagaaaaaatcaattcaatttggaagatcctcatcaaaaggagttgtttttggcaatgctgatgacaacttgtgatctttctgcaattacaaaaccctggcctattcaacaacggatagcagaacttgtagcaactgaattttttgatcaaggagacagagagagaaaagaactcaacatagaacccactgatctaatgaacagggggaagaaaaacaaaatcccaagtatgcaagttgggttcatagatgccatctgcctgcaactgtatgaggccctgacccacgtgtcagaggactgtttccctttgctagatggctgcagaaagaacaggcagaaatggcaggcccttgcagaacagcag

SEQ ID NO: 8470 - DNA, 978 bp, Artificial Sequence
  source: /note="Description of Artificial Sequence: Synthetic Destabilizing Domain (DD)"
gaagaaacaagagagctacagtcgttagcggctgctgtggtgccatctgcccagacccttaaaattactgactttagcttcagtgactttgagctgtctgatctggaaacagcactgtatacaattcggatgtttactgacctcaaccttgtgcagaacttccagatgaaacatgaggttctttgcagatggattttaagtgttaagaagaattatcggaagaatgttgcctatcataattggagacatgcctttaatacagctcagtgcatgtttgctgctctaaaagcaggcaaaattcagaacaagctgactgacctggagatacttgcattgctgattgctgcactaagccacgatttggatcaccgtggtgtgaataactcttacatacagcgaagtgaacatccacttgcccagctttactgccattcaatcatggaacaccatcattttgaccagtgcctgatgattcttaatagtccaggcaatcagattctcagtggcctctccattgaagaatataagaccacgttgaaaataatcaagcaagctattttagctacagacctagcactgtacattaagaggcgaggagaattttttgaacttataagaaaaaatcaattcaatttggaagatcctcatcaaaaggagttgtttttggcaatgctgatgacagcttgtgatctttctgcaattacaaaaccctggcctattcaacaacggatagcagaacttgtagcaactgaattttttgatcaaggagacagagagagaaaagaactcaacatagaacccactgatctaatgaacagggagaagaaaaacaaaatcccaagtatgcaagttgggttcatagatgccatctgcttgcaactgtatgaggccctgacccacgtgtcagaggactgtttccctttgctagatggctgcagaaagaacaggcagaaatggcaggcccttgcagaacagcag

SEQ ID NO: 8471 - DNA, 978 bp, Artificial Sequence
  source: /note="Description of Artificial Sequence: Synthetic Destabilizing Domain (DD)"
gaagaaacaagagagctacagtcgttagcggctgctgtggtgccatctgcccagacccgtaaaattactgactttagcttcagtgactttgagctgtctgatctggaaacagcactgtgtacaattcggatgtttactgacctcaaccttgtgccgaacttccagatgaaacatgaggttctttgcagatggattttaagtgttaagaagaattatcggaagaatgttgcctatcataattggagacatgcctttaatacagctcagtgcatgtttgctgctctaaaagcaggcaaaattcagaacaagctgactgacctggagatacttgcattgctgattgctgcactaagccacgatttggatcaccgtggtgtgaataactcttacatacagcgaagcgaacatccacttgcccagctttactgccattcaatcatggaacaccatcattttgaccagtgcctgatgattcttaatagtccaggcaatcagattctcagtggcctctccattgaagaatataataccacgttgaaaataatcaagcaagctattttagctacagacctagcactgtacattgagaggcgaggagaattttttgaacttataagaaaaaatcaattcaatttggaagatcctcatcaaaaggagttgtttttggcaatgctgatgacagcttgtgatctttctgcaattacaaaaccctggcctattcaacaacggatagcagaacttgtagcaactgaattttttgatcaaggagacagagagagaaaagaactcaacatagaacccactgatctaatgaacagggagaagaaaaacaaaatcccaagtatgcaagttgggttcatagatgccatctgcttgcaactgtatgaggccctgacccacgtgtcagaggactgtttccctttgctagatggctgcagaaagaacaggcagaaatggcaggcccttgcagaacagcag

SEQ ID NO: 8472 - DNA, 978 bp, Artificial Sequence
  source: /note="Description of Artificial Sequence: Synthetic Destabilizing Domain (DD)"
gaagaaacaagagagctacagtcgttagcggctgctgtggtgccatctgcccagacccttaaaattactgactttagcttcagtgactttgagctgtctgatctggaaacagcactgtgtacaattcggatgtttactgacctcaaccttgtgcagaacttccagatgaaacatgaggttctttgcagatggattttaagtgttaagaagaattatcggaagaatgttgcctatcgtaattggagacatgcctttaatacagctcagtgcatgtttgctgctctaaaagcaggcaaaattcagaacaagctgactgacctggagatacttgcattgctgattgctgcactaagccacgatttggatcaccgtggtgtgaataactcttacatacagcgaagtgaacatccacttgcccagctttactgccattcaatcatggaacaccatcattttgaccagtgcctgatgattcttaatagtccaggcaatcagattctcagtggcctctccattgaagaatataagaccacgttgaaaataatcaagcaagctattttagctacagacctagcactgtacattaagaggcgaggggaattttttgaacttataagaaaaaatcaattcaatttggaagatcctcatcaaaaggagttgtttttggcaatgctgatgacagcttgtgatctttctgcaattacaaaaccctggcctattcaacaacggatagcagaacttgtagcaactgaattttttgatcaaggagacagagagagaaaagaactcaacatagaacccactgatctaatgaacagggagaagaaaaacaaaatcccaagtatgcaagttgggttcatagatgccatctgcttgcaactgtatgaggccctgacccacgtgtcagaggactgtttccctttgctagatggctgcagaaagaacaggcagaaatggcaggcccttgcagaacagcag

SEQ ID NO: 8473 - DNA, 978 bp, Artificial Sequence
  source: /note="Description of Artificial Sequence: Synthetic Destabilizing Domain (DD)"
gaagaaacaagagagctacagtcgttagcggctgctgtggtgccatctgcccagacccttaaaattactgactttagcttcagtgactttgagctgtctgatctggaaacagcactgtgtacaattcggatgtttactgacctcaaccttgtgctgaacttccagatgaaacatgaggttctttgcagatggattttaagtgttaagaagaattatcggaagaatgttgcctatcataattggagacatgcctttaatacagctcagtgcatgtttgctgctctaaaagcaggcaaaattcagaacaagctgactgacctggagatacttgcattgctgattgctgcactaagccacgatttggatcaccgtggtgtgaataactattacatacagcgaagtgaacatccacttgcccagctttactgccattcaatcatggaacaccatcattttgaccagtgcctgatgattcttaatagtccaggcaatcagattctcagtggcctctccattgaagaatataagaccacgttgaaaataatcaagcaagctattttagctacagacctagcactgtacattaagaggcgaggagaattttttgaacttataagaaaaaatcaattcaatttggaagatcctcatcaaaaggagttgtttttggcaatgctgatgacaacttgtgatctttctgcaattacaaaaccctggcctattcaacaacggatagcagaacttgtagcaactgaattttttgatcaaggagacagagagagaaaagaactcaacatagaacccactgatctaatgaacagggggaagaaaaacaaaatcccaagtatgcaagttgggttcatagatgccatctgcctgcaactgtatgaggccctgacccacgtgtcagaggactgtttccctttgctagatggctgcagaaagaacaggcagaaatggcaggcccttgcagaacagcag

SEQ ID NO: 8474 - DNA, 978 bp, Artificial Sequence
  source: /note="Description of Artificial Sequence: Synthetic Destabilizing Domain (DD)"
gaagaaacaagagagctacagtcgttagcggctgctgtgatgccatctgcccagacccttaaaattactgactttagcttcagtgactttgagctgtctgatctggaaacagcactgtgtacaattcggatgtttactgacctcaaccttgtgcagaacttccagatgaaacatgaggttctttgcagatggattttaagtgttaagaagaattatcggaagaatgttgcctatcataattggagacatgcctttaatacagctcagtgcatgtttgctgctctaaaagcaggcaaaattcagaacaagctgactgacctggagatacttgcattgctgattgctgcactaagccacgatttggatcaccgtggtgtgaataactcttacatacagcgaagtgaacatccacttgcccagctttactgccattcaatcatggaacaccatcattttgaccagtgcctgatgattcttaatagtccaggcaatcagattctcagtggcctctccattgaagaatataagaccacgttgaaaataatcaagcaagctattttagctacagacctagcactgtacattaagaggcgaggagaattttttgaacttataagaaaaaatcaattcaatttggaagatcctcatcaaaaggagttgtttttggcaatgctgatgacagcttgtgatctttctgcaattacaaaaccctggcctattcaacaacggatagcagaacttgtagcaactgaattttttgatcaaggagacagagagagaaaagaactcaacatagaacccactaatctaatgaacagggagaagaaaaacaaaatcccaagtatgcaagttgggttcatagatgccatctgcttgcaactgtatgaggccctgacccacgtgtcagaggactgtttccctttgctagatggctgcagaaagaacaggcagaaatggcaggcccttgcagaacagcag

SEQ ID NO: 8475 - DNA, 978 bp, Artificial Sequence
  source: /note="Description of Artificial Sequence: Synthetic Destabilizing Domain (DD)"
gaagaaacaagagagctacagtcgttagcggctgctgtggtgccatctgcccagacccgtaaaattactgactttagcttcagtgactttgagctgtctgatctggaaacagcactgtgtacaattcggatgtttactgacctcaaccttgtgcagaacttcgagatgaaacatgaggttctttgcagatggattttaagtgttaagaagaattatcggaagaatgttgcctatcataattggagacatgcctttaatacagctcagtgcatgtttgctgctctaaaagcaggcaaaattcagaacaagctgactgacctggagatacttgcattgctgattgctgcactaagccacgatttggatcaccgtggtgtgaataactcttacatacagcgaagtgaacatccacttgcccagctttactgccattcaatcatggaacaccatcattttgaccagtgcctgatgattcttaatagtccaggcaatcagattctcagtggcctctccattgaagaatataagaccacgttgaaaataatcaagcaagctattttagctacagacctagcactgtacattaagaggcgaggagaattttttgaacttataagaaaaaatcaattcaatttggaagatcctcatcaaaaggagttgtttttggcaatgctgatgacagcttgtgatctttctgcaattacaaaaccctggcctattcaacaacggatagcagaacttgtagcaactgaattttttgatcaaggagacagagagagaaaagaactcaacatagaacccactgatctaatgaacagggagaagaaaaacaaaatcccaagtatgcaagttgggttcatagataccatctgcttgcaactgtatgaggccctgacccacgtgtcagaggactgtttccctttgctagatggctgcagaaagaacaggcagaaatggcaggcccttgcagaacagcag

SEQ ID NO: 8476 - DNA, 978 bp, Artificial Sequence
  source: /note="Description of Artificial Sequence: Synthetic Destabilizing Domain (DD)"
gaagaaacaagagagctacagtcgttagcggctgctgtggtgccatctgcccagacccttaaaattactgactttagcttcagtgactttgagctgtctgatctggaaatagcactgtgtacaattcggatgtttactgacctcaaccttgtgcagaacttccagatgaaacatgaggttctttgcagatggattttaagtgttaagaggaattatcggaagaatgttgcctatcataattggagacatgcctttaatacagctcagtgcatgtttgctgctctaaaagcaggcaaaattcagaacaaactgactgacctggagatacttgcattgctgattgctgcactaagccacgatttggatcaccgtggtgtgaataactcttacatacagcgaagtgaacatccacttgcccagctttactgccattcaatcatggaacaccatcattttgaccagtgcctgatgattcttaatagtccaggcaatcagattctcagtggcctctccaatgaagaatataagaccacgttgaaaataatcaagcaagctattttagctacagacctagcactgtacattaagaggcgaggagaattttttgaacttataagaaaaaatcaattcaatttggaagatcctcatcaaaaggagttgtttttggcaatgctgatgacagcttgtgatctttctgcaattacaaaaccctggcctattcaacaacggatagcagaacttgtagcaactgaattttttgatcaaggagacagagagagaagagaactcaacatagaacccactgatctaatgaacagggagaagaaaaacaaaatcccaagtatgcaagttgggttcatagatgccatctgcttgcaactgtatgaggccctgacccacgtgtcagaggactgtttccctttgctagatggctgcagaaagaacaggcagaaatggcaggcccttgcagaacagcag

SEQ ID NO: 8477 - DNA, 978 bp, Artificial Sequence
  source: /note="Description of Artificial Sequence: Synthetic Destabilizing Domain (DD)"
gaagaaacaagagagctacagtcgttagcggctgctgtggtgccatctgcccagacccttaaaattactgactttagcttcagtgactttgagctgtctgatctggaaacagcactgtgtacaattcggatgtttactgacctcaaccttgtgcagaacttccagatgaaacatgaggttctttgcagatggattttaagtgttaagaagaattatcggaagaatgttgcctatcataattggagacatgcctttaatacagctcagtgcatgtttgctgctctaaaagcaggcaaaattcagaacaagctgactgacctggagatacttgcattgctgattgctgcactaagccacgatttggatcaccgtgctgtgaataactcttacatacagcgaagtgaacatccacttgcccagctttactgccattcaatcatggaacaccatcattttgaccagtgcctgatgattcttaatagtccaggcaatcagattctcagtggcctctccattgaagaatataagaccacgttgaaaataatcaagcaagctattttagctacagacctagcactgtacattaagaggcgaggagaattttttgaacttataagaaaaaatcaattcaatttggaagatcctcatcaaaaggagttgtttttggcaatgctgatgacagcttgtgatctttctgcaattacaaaaccctggcctattcaacaacggatagcagaacttgtagcaattgaattttttgatcaaggagacagagagagaaaagaactcaacatagaacccactgatctaatgaacagggagaagaaaaacaaaatcccaagtatgcaagttgggttcatagatgccatctgcttgcaactgtatgaggccctgacccacgtgtcagaggactgtttccctttgctagatggctgcagaaagaacaggcagaaatggcaggcccttgcagaacagcag

SEQ ID NO: 8478 - DNA, 978 bp, Artificial Sequence; identical to SEQ ID NO: 8442
  source: /note="Description of Artificial Sequence: Synthetic Destabilizing Domain (DD)"

SEQ ID NO: 8479 - DNA, 978 bp, Artificial Sequence
  source: /note="Description of Artificial Sequence: Synthetic Destabilizing Domain (DD)"
gaagaaacaagagagctacagtcgttagcggctgctgtggtgccatctgcccagacccttaaaattactgactttagcttcagtgactttgagctgtctgatctggaaacagcactgtgtacaattcggatgtttactgacctcaaccttgtgcagaacttccagatgaaacatgaggttctttgcagatggattttaagtgttaagaagaattatcggaagaatgttgcctatcataattggagacttgcctttaatacagctcagtgcatgtttgctgctctaaaagcaggcaaaattcagaacaagctgactgacctggagatacttgcattgctgattgctgcactaagccacgatttggatcaccgtggtgtgaataactcttacatacagcgaagtgaacatccacttgcccagctttactgccattcaatcatggaacaccatcattttgaccagtgcctgatgattcttaatagtccaggcaatcagattctcagtggcctctccattgaagaatataagaccacgttgaaaataatcaagcaagctattttagttacagacctagcactgtacattaagaggcgaggagaattttttgaacttataagaaaaaatcaattcaatttggaagatcctcatcaaaaggagttgtttttggcaatgctgatgacagcttgtgatctttctgcaattacaaaaccctggcctattcaacaacggatagcagaacttgtagcaactgaattttttgatcaaggagacagagagagaaaagaactcaacatagaacccactgatctaatgaacagggagaagaaaaacaaaatcccaagtatgcaagttgggttcatagatgccatctgcttgcaactgtatgaggccctgacccacgtgtcagaggactgtttccctttgctagatggctgcagaaagaacaggcagaaatggcaggcccttgcagaacagcag

SEQ ID NO: 8480 - DNA, 978 bp, Artificial Sequence
  source: /note="Description of Artificial Sequence: Synthetic Destabilizing Domain (DD)"
gaagaaacaagagagctacagtcgttagcggctgctgtggtgccatctgcccagacccttaaaattactgactttagcttcagtgactttgagctgtctgatctggaaacagcactgtgtacaattcggatgtttactgacctcaaccttgtgcagaacttccagatgaaacatgaggttctttgcagatggattttaagtgttaagaagaattatcggaagtatgttgcctatcataattggagacatgcctttaatacagctcagtgcatgtttgctgctctaaaagcaggcaaaattcagaacaagctgactgacctggagatacttgcattgctgattgctgcactaagccacgatttggatcaccgtggtgtgaataactcttacatacagcgaagtgaacatccacttgcccagctttactgccattcaatcatggaacaccatcattttgaccagtgcctgatgattcttaatagtccaggcaatcagattctcagtggcctctccattgaagaatataagaccacgttgaaaataatcaagcaagctattttagctacagacctagcactgtacattaagaggcgaggagaattttttgaacttataagaaaaaatcaattcaatttggaagatcctcatcaaaaggagttgtttttggcaatgctgatgacagcttgtgatctttctgcaattacaaaaccctggcctattcaacaacggatagcagaacttgtagcaactgaattttttgatcaaggagacagagagagaaaagaactcaacttagaacccactgatctaatgaacagggagaagaaaaacaaaatcccaagtatgcaagttgggttcatagatgccatctgcttgcaactgtatgaggccctgacccacgtgtcagaggactgtttccctttgctagatggctgcagaaagaacaggcagaaatggcaggcccttgcagaacagcag

SEQ ID NO: 8481 - DNA, 978 bp, Artificial Sequence
  source: /note="Description of Artificial Sequence: Synthetic Destabilizing Domain (DD)"
gaagaaacaagagagctacagtcgttagcggctgctgtggtgccatctgcccagacccttaaaattactgactttagcttaagtgactttgagctgtctgatctggaaacagcactgtgtacaattcggatgtttactgacctcaaccttgtgcagaacttccagatgaaacatgaggttctttgcagatggattttaagtgttaagaagaattatcggaagaatgttgcctatcataattggagacatgcctttaatacagctcagtgcatgtttgctgctctaaaagcaggcaaaattcagaacaagctgactgacctggagatacttgcattgctgattgctgcactaagccacgatttggatcaccgtgctgtgaataactcttacatacagcgaagtgaacatccacttgcccagctttactgccattcaatcatggaacaccatcattttgaccagtgcctgatgattcttaatagtccaggcaatcagattctcagtggcctctccattgaagaatataagaccacgttgaaaataatcaagcaagctattttagctacagacctagcactgtacattaagaggcgaggagaattttttgaacttataagaaaaaatcaattcaatttggaagatcctcatcaaaaggagttgtttttggcaatgctgatgacagcttgtgatctttctgcaattacaaaaccctggcctattcaacaacggatagcagaacttgtagcaattgaattttttgatcaaggagacagagagagaaaagaactcaacatagaacccactgatctaatgaacagggagaagaaaaacaaaatcccaagtatgcaagttgggttcatagatgccatctgcttgcaactgtatgaggccctgacccacgtgtcagaggactgtttccctttgctagatggctgcagaaagaacaggcagaaatggcaggcccttgcagaacagcag

SEQ ID NO: 8482 - DNA, 978 bp, Artificial Sequence
  source: /note="Description of Artificial Sequence: Synthetic Destabilizing Domain (DD)"
gaagaaacaagagagctacagtcgttagcggctgctgtggtgccatctgcccagacccttaaaattactgactttagcttcagtgactttgagctgtctgatctggaaacagcactgtgtacaattcggatgtttactgacctcaaccttgtgcagaacttccagatgaaacatgaggttctttgcagatggattttaagtgttaagaagaattatcggaagaatgttgcctatcataattggagacatgcctttaatacagctcagtgcatgtttgctgctctaaaagcaggcaaaattcagaacaagctgactgacctggagatacttgcattgctgattgctgcactaagccacgatttggatcaccgtggtgtgaataactcttacatacagcgaagtgaacatccacttgcccagctttactgccattcaatcatggaacaccatcattttgaccagtgcctgatgattcttaatagtccaggcaatcagattctcagtggcctctccattgaagaatataagaccacgttgaaaataatcaagcaagctattttagctacagacctagcactgtacattaagaggcgaggagaattttttgaacttataagaaaaaatcaattcaatttggaagatcctcatcaaaaggagttgtttttggcaatgctgatgacagcttgtgatctttctgcaattacaaaaccctggcctattcaacaacggatagcagaacttgtagcaactgaattttttgatcaaggagacagagagagaaacgaactcaacatagaacccactgatctaatgaacagggagaagaaaaacaaaatcccaagtatgcaagttgggttcatagatgccatctgcttgcaactgtatgaggccctgacccacgtgtcagaggactgtttccctttgctagatggctgcagaaagaacaggcagaaatggcaggcccttgcagaacagcag

SEQ ID NO: 8483 - DNA, 978 bp, Artificial Sequence
  source: /note="Description of Artificial Sequence: Synthetic Destabilizing Domain (DD)"
gaagaaacaagagagctacagtcgttagcggctgctgtggtgccatctgcccagacccttaaaattactgactttagcttcagtgactttgagctgtctgatctggaaacagcactgtgtacaattcggatgtttactgacctcaaccttgtgcagaacttccagatgaaacatgaggttctttgcagatggattttaagtgttaagaagaattatcggaagaatgttgcctatcataattggagacatgcctttaatacagctcagtgcatgtttgctgctctaaaagcaggcaaaattcagaacaagctgactgacctggagatacttgcattgctgattgctgcactaagccacgatttggatcaccgtggtgtgaataactcttacatacagcgaagtgaacatccacttgcccagctttactgccattcaatcatggaacaccatcattttgaccagtgcctgatgattcttaatagtccaggcaatcagattctcagtggcctctccattgaagaatataagaccacgttgaaaataatcaagcaagctattttagctacagacctagcactgtacattaagaggcgaggagaattttttgaacttataagaaaaaatcaattcaatttggaagatcctcatcaaaaggagttgtttttggcaatgctgatgacagcttgtgatctttctgcaattacacaaccctggcctattcaacaacggatagcagaacttgtagcaactgaattttttgatcaaggagacagagagagaaaagaactcaacatagaacccactgatctaatgaacagggagaagaaaaacaaaatcccaagtatgcaagttgggttcatagatgccatctgcttgcaactgtatgaggccctgacccacgtgtcagaggactgtttccctttgctagatggctgcagaaataacaggcagaaatggcaggcccttgcagaacagcag

SEQ ID NO: 8484 - DNA, 978 bp, Artificial Sequence
  source: /note="Description of Artificial Sequence: Synthetic Destabilizing Domain (DD)"
gaagaaacaagagagctacagtcgttagcggctgctgtggtgccatctgcccagacccttaaaattactgactttagcttcagtgactttgagctgtctgatctggaaacagcactgtgtacaattcggatgtttactgacctcaaccttgtgcagaacttccagatgaaacatgaggttctttgcagatggattttaagtgttaagaaggattatcggaagaatgttgcctatcataattggagacatgcctttaatacagctcagtgcatgtttgctgctctaaaagcaggcaaaattcagaacaagctgactgacctggagatacttgcattgctgattgctgcactaagccacgatttggatcaccgtggtgtgaataactcttacatacagcgaagtgaacatccacttgcccagctttactgccattcaatcatggaacaccatcattttgaccagtgcctgatgattcttaatagtccaggcaatcagattctcagtggcctctccattgaagaatataagaccacgttgaaaataatcaagcaagctattttagctacagacctagcactgtacattaagaggcgaggagaattttttgaacttataagaaaaaatcaattcaatttggaagatcctcatcaaaaggagttgtttttggcaatgctgatgacagcttgtgatctttctgcaattacaaaaccctggcctattcaacaacggatagcagaacttgtagcaactgaattttttgatcaaggagacagagagagaaaagaactcaacatagaacccactgatctaatgaacagggagaagaaaaacaaaatcccaagtatgcaagttgggttcatagatgccatctgcttgcaactgtatgaggccctgacccacgtgtcagaggactgtttccctttgctagatggctgcagaaagaacaggcagaaatggcaggcccttgcagaacagcag

SEQ ID NO: 8485 - DNA, 978 bp, Artificial Sequence; identical to SEQ ID NO: 8460
  source: /note="Description of Artificial Sequence: Synthetic Destabilizing Domain (DD)"

SEQ ID NO: 8486 - DNA, 978 bp, Artificial Sequence
  source: /note="Description of Artificial Sequence: Synthetic Destabilizing Domain (DD)"
gaagaaacaagagagctacagtcgttagcggctgctgtgatgccatctgcccagacccttaaaattactgactttagcttcagtgactttgagctgtctgatctggaaacagcactgtgtacaattcggatgtttactgacctcaaccttgtgcagaacttccagatgaaacatgaggttctttgcagatggattttaagtgttaagaagaattatcggaagaatgttgcctatcataattggagacatgcctttaatacagctcagtgcatgtttgctgctctaaaagcaggcaaaattcagaacaagctgactgacctggagatacttgcattgctgattgctgcactaagccacgatttggatcaccgtggtgtgaataactcttacatacagcgaagtgaacatccacttgcccagctttactgccattcaatcatggaacaccatcattttgaccagtgcctgatgattcttaatagtccaggcaatcagattctcagtggcctctccattgaagaatataagaccacgttgaaaataatcaagcaagctattttagctacagacctagcactgtacattaagaggcgaggagaattttttgaacttataagaaaaaatcaattcaatttggaagatcctcatcaaaaggagttgtttttggcaatgctgatgacagcttgtgatctttctgcaattacaaaaccctggcctattcaacaacggatagcagaacttgtagcaactgaattttttgatcaaggagacagagagagaaaagaactcaacatagaacccactgatctaatgaacagggagaagaaaaacaaaatcccaagtatgcaagttgggatcatagatgccatctgcttgcaactgtatgaggccctgacccacgtgtcagaggactgtttccctttgctagatggctgcagaaagaacaggcagaaatggcaggcccttgcagaacagcag

SEQ ID NO: 8487 - DNA, 978 bp, Artificial Sequence
  source: /note="Description of Artificial Sequence: Synthetic Destabilizing Domain (DD)"
gaagaaacaagagagctacagtcgttagcggctgctgtggtgccatctgcccagacccttaaaattactgactttagcttcagtgactttgagctgtctgatctggaaacagcactgtgtacaattcggatgtttactgacctcaaccttgtgcagaacttccagatgaaacatgaggttctttgcagatggattttaagtgttaagaagaattatcggaagaatgttgcctatcataattggagacatgcctttaatacagctcagtgcatgtttgctgctctaaaagcaggcaaaattcagaacaagctgactgacctggagatacttgcattgctgattgctgcactaagccacgatttggatcaccgtggtgtgaataactcttacatacagcgaagtgaacatccacttgcccagctttactgccattcaatcatggaacaccatcattttgaccagtgcctgatgattcttaatagtccaggcaatcagattctcagtggcctctccattgaagaatataagaccacgttgaaaataatcaagcaagctattttagctacagacctagcactgtacattaagaggcgaggagaattttttgaacttataagaaaaaatcaattcaatttggaagatcctcatcaaaaggagttgtttttggcaatgctgatgacagcttgtgatctttctgcaattacaaaaccctggcctattcaacaacggatagcagaacttgtagcaactgaattttttgatcaaggagacagagagagaaaagaactcaacttagaacccactgatctaatgaacagggagaagaaaaacaaaatcccaagtatgcaagttgggttcatagatgccatctgcttgcaactgtatgaggccctgacccacgtgtcagaggactgtttccctttgctagatggctgcagaaagaacaggcagaaatggcaggcccttgcagaacagcag

SEQ ID NO: 8488 - DNA, 978 bp, Artificial Sequence
  source: /note="Description of Artificial Sequence: Synthetic Destabilizing Domain (DD)"
gaagaaacaagagagctacagtcgttagcggctgctgtggtgccatctgcccagacccttaaaattactgactttagcttcagtgactttgagctgtctgatctggaaacagcactgtgtacaattcggatgtttactgacctcaaccttgtgcagaacttccagatgaaacatgaggttctttgcagatggattttaagtgttaagaagaattatcagaagaatgttgcctatcataattggagacatgcctttaatacagctcagtgcatgtttgctgctctaaaagcaggcaaaattcagaacaagctgactgacctggagatacttgcattgctgattgctgcactaagccacgatttggatcaccgtggtgtgaataactcttacatacagcgaagtgaacatccacttgcccagctttactgccattcaatcatggaacaccatcattttgaccagtgcctgatgattcttaatagtccaggcaatcagattctcagtggcctctccattgaagaatataagaccacgttgaaaataatcaagcaagctattttagctacagacctagcactgtacattaagaggcgaggagaattttttgaacttataagaaaaaatcaattcaatttggaagatcctcatcaaaaggagttgtttttggcaatgctgatgacagcttgtgatctttctgcaattacaaaaccctggcctattcaacaacggatagcagaacttgtagcaactgaattttttgatcaaggagacagagagagaaaagaactcaacatagaacccactgatctaatgaacagggagaagaaaaacaaaatcccaagtatgcaagttgggttcatagatgccatctgcttgcaactgtatgaggccctgacccacgtgtcagaggactgtttccctttgctagatggctgcagaaagaacaggcagaaatggcaggcccttgcagaacagcag

SEQ ID NO: 8489 - DNA, 978 bp, Artificial Sequence
  source: /note="Description of Artificial Sequence: Synthetic Destabilizing Domain (DD)"
gaagaaacaagagagctacagtcgttagcggctgctgtggtgccatttgcccagacccgtaaaattactgactttagcttcagtgactttgagctgtctgatctggaaacagcactgtgtacaattcggatgtttactgacctcaaccttgtgcagaacttccagatgaaacatgaggttctttgcagatggattttaagtgttaagaagaattatcggaagaatgttgcctatcataattggagacatgcctttaatacagctcagtgcatgtttgctgctctaaaagcaggcaaaattcagaacaagctgactgacctggagatacttgcattgctgattgctgcactaagccacgatttggatcaccgtggtgtgaataactcttacatacagcgaagtgaacatccacttgcccagctttactgccattcaatcatggaacaccatcattttgaccagtgcctgatgattcttaatagtccaggcaatcagattctcagtggcctctccattgaagaatataagaccacgttgaaaataatcaagcaagctattttagctacagacctagcactgtacattaagaggcgaggagaattttttgaacttataagaaaaaatcaattcaatttggaagatcctcatcaaaaggagttgtttttggcaatgctgatgacagcttgtgatctttctgcaattacaaaaccctggcctattcaacaacggatagcagaacttgtagcaactgaattttttgatcaaggagacagagagagaaaagaactcaacatagaacccactgatctaatgaacagggagaagaaaaacaaaatcccaagtatgcaagttgggttcatagatgccatctgcttgcaactgtatgaggccctgacccacgtgtcagaggactgtttccctttgctagatggctgcagaaagaacaggcagaaatggcaggcccttgcagaacagcag

SEQ ID NO: 8490 - DNA, 978 bp, Artificial Sequence
  source: /note="Description of Artificial Sequence: Synthetic Destabilizing Domain (DD)"
gaagaaacaagagagctacagtcgttagcggctgctgtggtgtcatctgcccagacccttaaaattactgactttagcttcagtgacattgagctgtctgatctggagacagcactgtgtacaattcggatgtttactgacctcaaccttgtgcagaacttccagatgaaacatgaggttctttgcagatggattttaagtgttaagaagaattatcggaagaatgttgcctatcataattggagacatgcctttaatacagctcagtgcatgtttgctgctctaaaagcaggcaaaattcagaacaagctgactgacctggagatacttgcattgctgattgctgcactaagccacgatttggatcaccatggtgtgaataactcttacatacagcgaagtgaacatccacttgcccagctttactgccattcaatcatggaacaccatcattttgaccagtgcctgatgattcttaatagtccaggcaatcagattctcagtggcctctccattgaagaatataagaccacgttgaaaataatcaagcaagctattttagctacagacctagcactgtacattaagaggcgaggagaattttttgaacttataagaaaaaatcaattcaatttggaagatcctcatcaaaaggagttgtttttggcaatgctgatgacagcttgtgatctttctgcaattacaaaaccctggcctattcaacaacggataacagaacttgtagcaactgaattttttgatcaaggagacagagagagaaaagaactcaacatagaacccactgatctaatgaacagggagaagaaaaacaaaatcccaagtatgcaagttgggttcatagatgccatctgcttgcaactgtatgaggccctgacccacgtgtcagaggactgtttccctttgctagatggctgcggaaagaacaggcagaaatggcaggcccttgcagaacagcag

SEQ ID NO: 8491 - protein, 567 aa, Artificial Sequence
  source: /note="Description of Artificial Sequence: Synthetic polypeptide"
MVSKGAELFTGIVPILIELNGDVNGHKFSVSGEGEGDATYGKLTLKFICTTGKLPVPWPTLVTTLSYGVQCFSRYPDHMKQHDFFKSAMPEGYIQERTIFFEDDGNYKSRAEVKFEGDTLVNRIELTGTDFKEDGNILGNKMEYNYNAHNVYIMTDKAKNGIKVNFKIRHNIEDGSVQLADHYQQNTPIGDGPVLLPDNHYLSTQSALSKDPNEKRDHMIYFGFVTAAAITHGMDELYKSGEETRELQSLAAAVVPSAQTLKITDFSFSDFELSDLETALCTIRMFTDLNLVQNFQMKHEVLCRWILSVKKNYRKNVAYHNWRHAFNTAQCMFAALKAGKIQNKLTDLEILALLIAALSHDLDHRGVNNSYIQRSEHPLAQLYCHSIMAHHHFDQCLMILNSPGNQILSGLSIEEYKTTLKIIKQAILATDLALYIKRRGEFFELIRKNQFNLEDPHQKELFLAMLMTACDLSAITKPWPIQQRIAELVATEFFDQGDRERKELNIEPTDLMNREKKNKIPSMQVGFIDAICLQLYEALTHVSEDCFPLLDGCRKNRQKWQALAEQQ

SEQ ID NO: 8492 - protein, 567 aa, Artificial Sequence
  source: /note="Description of Artificial Sequence: Synthetic polypeptide"
MVSKGAELFTGIVPILIELNGDVNGHKFSVSGEGEGDATYGKLTLKFICTTGKLPVPWPTLVTTLSYGVQCFSRYPDHMKQHDFFKSAMPEGYIQERTIFFEDDGNYKSRAEVKFEGDTLVNRIELTGTDFKEDGNILGNKMEYNYNAHNVYIMTDKAKNGIKVNFKIRHNIEDGSVQLADHYQQNTPIGDGPVLLPDNHYLSTQSALSKDPNEKRDHMIYFGFVTAAAITHGMDELYKSGEETRELQSLAAAVVPSAQTLKITDFSFSDFELSDLETALCTIRMFTDLNLVQNFQMKHEVLCRWILSVKKNYRKNVAYHNWRHAFNTAQCMFAALKAGKIQNKLTDLEILALLIAALSHDLDHRGVNNSYIQRSEHPLAQLYCHSIMEHHHFDQCLMILNSPGNQILSGLSIEEYKTTLKIIKQAILATALALYIKRRGEFFELIRKNQFNLEDPHQKELFLAMLMTACDLSAITKPWPIQQRIAELVATEFFDQGDRERKELNIEPTDLMNREKKNKIPSMQVGFIDAICLQLYEALTHVSEDCFPLLDGCRKNRQKWQALAEQQ

SEQ ID NO: 8493 - protein, 574 aa, Artificial Sequence
  source: /note="Description of Artificial Sequence: Synthetic polypeptide"
MEETRELQSLAAAVVPSAQTLKITDFSFSDFELSDLETALCTIRMFTDLNLVQNFQMKHEVLCRWILSVKKNYRKNVAYHNWRHAFNTAQCMFAALKAGKIQNKLTDLEILALLIAALSHDLDHRGVSNSYIQRSEHPLAQLYCHSIMEHHHFDQCLMILNSPGNQILSGLSIEEYKTTLKIIKQAILATDLALYIKRRGEFFELIRKNQFNLEDPHQKELFLAMLMTACDLSAITKPWPIQQRIAELVATEFFDQGDRERKELNIEPTDLMNREKKNKIPSMQVGFIDAICLQLYEALTHVSEDCFPLLDGCRKNRQKWQALAEQQGGSGGGSGGVSKGAELFTGIVPILIELNGDVNGHKFSVSGEGEGDATYGKLTLKFICTTGKLPVPWPTLVTTLSYGVQCFSRYPDHMKQHDFFKSAMPEGYIQERTIFFEDDGNYKSRAEVKFEGDTLVNRIELTGTDFKEDGNILGNKMEYNYNAHNVYIMTDKAKNGIKVNFKIRHNIEDGSVQLADHYQQNTPIGDGPVLLPDNHYLSTQSALSKDPNEKRDHMIYFGFVTAAAITHGMDELYK

SEQ ID NO: 8494 - protein, 574 aa, Artificial Sequence
  source: /note="Description of Artificial Sequence: Synthetic polypeptide"
MEETRELQSLAAAVVPSAQTLKITDFSFSDFELSDMETALCTIRMFTDLNLVQNFQMKHEVLCRWILSVKKNYRKNVAYHNWRHAFNTAQCMFAALKAGKIQNKLTDLEILALLIAALSHDLDHRGVNNSYIQRSEHPLAQLYCHSIMEHHHFDQCLMILNSPGNQILSGLSIEEYKTTLKIIKQAILATDLALYIKRRGEFFELIRKNQFNLEDPHQKELFLAMLMTACDLSAITKPWPIQQRIAELVATEFFDQGDRERKELNIEPTDLMNREKKNKIPSMQVGFIDAICLQLYEALSHVSEDCFPLLDGCRKNRQKWQALAEQQGGSGGGSGGVSKGAELFTGIVPILIELNGDVNGHKFSVSGEGEGDATYGKLTLKFICTTGKLPVPWPTLVTTLSYGVQCFSRYPDHMKQHDFFKSAMPEGYIQERTIFFEDDGNYKSRAEVKFEGDTLVNRIELTGTDFKEDGNILGNKMEYNYNAHNVYIMTDKAKNGIKVNFKIRHNIEDGSVQLADHYQQNTPIGDGPVLLPDNHYLSTQSALSKDPNEKRDHMIYFGFVTAAAITHGMDELYK

SEQ ID NO: 8495 - protein, 574 aa, Artificial Sequence
  source: /note="Description of Artificial Sequence: Synthetic polypeptide"
MEETRELQSLAAAVVPSAQTLKITDFSFSDFELSDLETALCTIRMFTDLNLVQNFQMKHEVLCRWILSVKKNYRKNVAYHNWRHAFNTAQCMFAALKAGKIQNKLTDLEILALLIAALSHDLDHRGVNNSYIQRSEHPLAQLYCHSIMEHHHFDQCLMILNSPGNQILSGLSIEEYKTTLKIIKQAILATDLALYIKRRGEFFELIRKNQFNLEDPHQKELFLAMLMTACDLSANTKPWPIQQRIAELVATEFFDQGDRERKELNIEPTDLMNREKKNKIPSMQVGFIDAICLQLYEALTHVSEDCFPLLDGCRKNRQKWQALAEQQGGSGGGSGGVSKGAELFTGIVPILIELNGDVNGHKFSVSGEGEGDATYGKLTLKFICTTGKLPVPWPTLVTTLSYGVQCFSRYPDHMKQHDFFKSAMPEGYIQERTIFFEDDGNYKSRAEVKFEGDTLVNRIELTGTDFKEDGNILGNKMEYNYNAHNVYIMTDKAKNGIKVNFKIRHNIEDGSVQLADHYQQNTPIGDGPVLLPDNHYLSTQSALSKDPNEKRDHMIYFGFVTAAAITHGMDELYK

SEQ ID NO: 8496 - protein, 574 aa, Artificial Sequence
  source: /note="Description of Artificial Sequence: Synthetic polypeptide"
MEETRELQSLAAAVVPSAQTLKITDFSFSDFELSDLETALCTIRMFTDLNLVQNFQMKHEVLCRWILSVKKNYWKNVAYHNWRHAFNTAQCMFAALKAGKIQNKLTDLEILALLIAALSHDLDHRGVNNSYIQRSEHPLAQLYCHSIMEHHHFDQCLMILNSPGNQILSGLSIEEYKTTLKIIKQAILATDLALYIKRRGEFFELIRKNQFNLEDPHQKELFLAMLMTACDLSAITKPWPIQQRIAELVATEFFDQGDRERKELNIEPTDLMNREKKNKIPSMQVGFIDAICLQLYEALTHVSEDCFPLLDGCRKNRQKWQALAEQQGGSGGGSGGVSKGAELFTGIVPILIELNGDVNGHKFSVSGEGEGDATYGKLTLKFICTTGKLPVPWPTLVTTLSYGVQCFSRYPDHMKQHDFFKSAMPEGYIQERTIFFEDDGNYKSRAEVKFEGDTLVNRIELTGTDFKEDGNILGNKMEYNYNAHNVYIMTDKAKNGIKVNFKIRHNIEDGSVQLADHYQQNTPIGDGPVLLPDNHYLSTQSALSKDPNEKRDHMIYFGFVTAAAITHGMDELYK

SEQ ID NO: 8497 - protein, 574 aa, Artificial Sequence
  source: /note="Description of Artificial Sequence: Synthetic polypeptide"
MEETRELQSLAAAVVPSAQTLKITDFSFSDFELSDLETALCTIRMFTDLNLVQNFQMKHEVLCRWILSVKKNYRKNVAYHNWRHAFSTAQCMFAALKAGKIQNKLTDLEILALLIAALSHDLDHRGVNNSYIQRSEHPLAQLYCHSIMEHHHFDQCLMILNSPGNQILSGLSIEEYKTTLKIIKQAILATDLALYIKRRGEFFELIRKNQFNLEDPHQKELFLAMLMTACDLSAITKPWPIQQRIAELVATEFFDQGDRERKELNIEPTDLMNREKKNKIPSMQVGFIDAICLQLYEALTHVSEDCFPLLDGCRKNRQKWQALAEQQGGSGGGSGGVSKGAELFTGIVPILIELNGDVNGHKFSVSGEGEGDATYGKLTLKFICTTGKLPVPWPTLVTTLSYGVQCFSRYPDHMKQHDFFKSAMPEGYIQERTIFFEDDGNYKSRAEVKFEGDTLVNRIELTGTDFKEDGNILGNKMEYNYNAHNVYIMTDKAKNGIKVNFKIRHNIEDGSVQLADHYQQNTPIGDGPVLLPDNHYLSTQSALSKDPNEKRDHMIYFGFVTAAAITHGMDELYK

SEQ ID NO: 8498 - protein, 574 aa, Artificial Sequence
  source: /note="Description of Artificial Sequence: Synthetic polypeptide"
MEETRELQSLAAAVVPSAQTRKITDFSFSDFELSDLETALCTIRMFTDLNLVQNFEMKHEVLCRWILSVKKNYRKNVAYHNWRHAFNTAQCMFAALKAGKIQNKLTDLEILALLIAALSHDLDHRGVNNSYIQRSEHPLAQLYCHSIMEHHHFDQCLIILNSPGNQILSGLSIEEYKTTLKIIKQAILATDLALYIKRRGEFFELIRKNQFNLEDPHQKELFLAMLMTACDLSAITKPWPIQQRIAELVATEFFDQGDRERKELNIEPTDLMNREKKNKIPSMQVGFIDAICLQLYEALTHVSEDCFPLLDGCRKNRQKWQALAEQQGGSGGGSGGVSKGAELFTGIVPILIELNGDVNGHKFSVSGEGEGDATYGKLTLKFICTTGKLPVPWPTLVTTLSYGVQCFSRYPDHMKQHDFFKSAMPEGYIQERTIFFEDDGNYKSRAEVKFEGDTLVNRIELTGTDFKEDGNILGNKMEYNYNAHNVYIMTDKAKNGIKVNFKIRHNIEDGSVQLADHYQQNTPIGDGPVLLPDNHYLSTQSALSKDPNEKRDHMIYFGFVTAAAITHGMDELYK

SEQ ID NO: 8499 - protein, 574 aa, Artificial Sequence
  source: /note="Description of Artificial Sequence: Synthetic polypeptide"
MEETRELQSLAAAVVPSAQTLKITDFSFSDFELSDLETALCTIRMFTDLNLVQNFQMKHEVLCRWILSVKKNYRKNVAYHNRRHAFNTAQCMFAALKAGKIQNKLTDLEILALLIAALSHDLDHRGVNNSYIQRSEHPLAQLYCHSIMEHHHFDQCLMILNSPGNQILSGLSIEEYKTTLKIIKQAILARDLALYIKRRGEFFELIRKNQFNLEDPHQKELFLAMLMTTCDLSAITKPWPIQQRIAELVATEFFDQGDRERKELNIEPTDLMNRGKKNKIPSMQVGFIDAICLQLYEALTHVSEDCFPLLDGCRKNRQKWQALAEQQGGSGGGSGGVSKGAELFTGIVPILIELNGDVNGHKFSVSGEGEGDATYGKLTLKFICTTGKLPVPWPTLVTTLSYGVQCFSRYPDHMKQHDFFKSAMPEGYIQERTIFFEDDGNYKSRAEVKFEGDTLVNRIELTGTDFKEDGNILGNKMEYNYNAHNVYIMTDKAKNGIKVNFKIRHNIEDGSVQLADHYQQNTPIGDGPVLLPDNHYLSTQSALSKDPNEKRDHMIYFGFVTAAAITHGMDELYK

SEQ ID NO: 8500 - protein, 574 aa, Artificial Sequence
  source: /note="Description of Artificial Sequence: Synthetic polypeptide"
MEETRELQSLAAAVVPSAQTLKITDFSFSDFELSDLETALYTIRMFTDLNLVQNFQMKHEVLCRWILSVKKNYRKNVAYHNWRHAFNTAQCMFAALKAGKIQNKLTDLEILALLIAALSHDLDHRGVNNSYIQRSEHPLAQLYCHSIMEHHHFDQCLMILNSPGNQILSGLSIEEYKTTLKIIKQAILATDLALYIKRRGEFFELIRKNQFNLEDPHQKELFLAMLMTACDLSAITKPWPIQQRIAELVATEFFDQGDRERKELNIEPTDLMNREKKNKIPSMQVGFIDAICLQLYEALTHVSEDCFPLLDGCRKNRQKWQALAEQQGGSGGGSGGVSKGAELFTGIVPILIELNGDVNGHKFSVSGEGEGDATYGKLTLKFICTTGKLPVPWPTLVTTLSYGVQCFSRYPDHMKQHDFFKSAMPEGYIQERTIFFEDDGNYKSRAEVKFEGDTLVNRIELTGTDFKEDGNILGNKMEYNYNAHNVYIMTDKAKNGIKVNFKIRHNIEDGSVQLADHYQQNTPIGDGPVLLPDNHYLSTQSALSKDPNEKRDHMIYFGFVTAAAITHGMDELYK

SEQ ID NO: 8501 - protein, 574 aa, Artificial Sequence
  source: /note="Description of Artificial Sequence: Synthetic polypeptide"
MEETRELQSLAAAVVPSAQTRKITDFSFSDFELSDLETALCTIRMFTDLNLVPNFQMKHEVLCRWILSVKKNYRKNVAYHNWRHAFNTAQCMFAALKAGKIQNKLTDLEILALLIAALSHDLDHRGVNNSYIQRSEHPLAQLYCHSIMEHHHFDQCLMILNSPGNQILSGLSIEEYNTTLKIIKQAILATDLALYIERRGEFFELIRKNQFNLEDPHQKELFLAMLMTACDLSAITKPWPIQQRIAELVATEFFDQGDRERKELNIEPTDLMNREKKNKIPSMQVGFIDAICLQLYEALTHVSEDCFPLLDGCRKNRQKWQALAEQQGGSGGGSGGVSKGAELFTGIVPILIELNGDVNGHKFSVSGEGEGDATYGKLTLKFICTTGKLPVPWPTLVTTLSYGVQCFSRYPDHMKQHDFFKSAMPEGYIQERTIFFEDDGNYKSRAEVKFEGDTLVNRIELTGTDFKEDGNILGNKMEYNYNAHNVYIMTDKAKNGIKVNFKIRHNIEDGSVQLADHYQQNTPIGDGPVLLPDNHYLSTQSALSKDPNEKRDHMIYFGFVTAAAITHGMDELYK

SEQ ID NO: 8502 - protein, 574 aa, Artificial Sequence
  source: /note="Description of Artificial Sequence: Synthetic polypeptide"
MEETRELQSLAAAVVPSAQTLKITDFSFSDFELSDLETALCTIRMFTDLNLVQNFQMKHEVLCRWILSVKKNYRKNVAYRNWRHAFNTAQCMFAALKAGKIQNKLTDLEILALLIAALSHDLDHRGVNNSYIQRSEHPLAQLYCHSIMEHHHFDQCLMILNSPGNQILSGLSIEEYKTTLKIIKQAILATDLALYIKRRGEFFELIRKNQFNLEDPHQKELFLAMLMTACDLSAITKPWPIQQRIAELVATEFFDQGDRERKELNIEPTDLMNREKKNKIPSMQVGFIDAICLQLYEALTHVSEDCFPLLDGCRKNRQKWQALAEQQGGSGGGSGGVSKGAELFTGIVPILIELNGDVNGHKFSVSGEGEGDATYGKLTLKFICTTGKLPVPWPTLVTTLSYGVQCFSRYPDHMKQHDFFKSAMPEGYIQERTIFFEDDGNYKSRAEVKFEGDTLVNRIELTGTDFKEDGNILGNKMEYNYNAHNVYIMTDKAKNGIKVNFKIRHNIEDGSVQLADHYQQNTPIGDGPVLLPDNHYLSTQSALSKDPNEKRDHMIYFGFVTAAAITHGMDELYK

SEQ ID NO: 8503 - protein, 574 aa, Artificial Sequence
  source: /note="Description of Artificial Sequence: Synthetic polypeptide"
MEETRELQSLAAAVVPSAQTLKITDFSFSDFELSDLETALCTIRMFTDLNLVLNFQMKHEVLCRWILSVKKNYRKNVAYHNWRHAFNTAQCMFAALKAGKIQNKLTDLEILALLIAALSHDLDHRGVNNYYIQRSEHPLAQLYCHSIMEHHHFDQCLMILNSPGNQILSGLSIEEYKTTLKIIKQAILATDLALYIKRRGEFFELIRKNQFNLEDPHQKELFLAMLMTTCDLSAITKPWPIQQRIAELVATEFFDQGDRERKELNIEPTDLMNRGKKNKIPSMQVGFIDAICLQLYEALTHVSEDCFPLLDGCRKNRQKWQALAEQQGGSGGGSGGVSKGAELFTGIVPILIELNGDVNGHKFSVSGEGEGDATYGKLTLKFICTTGKLPVPWPTLVTTLSYGVQCFSRYPDHMKQHDFFKSAMPEGYIQERTIFFEDDGNYKSRAEVKFEGDTLVNRIELTGTDFKEDGNILGNKMEYNYNAHNVYIMTDKAKNGIKVNFKIRHNIEDGSVQLADHYQQNTPIGDGPVLLPDNHYLSTQSALSKDPNEKRDHMIYFGFVTAAAITHGMDELYK

SEQ ID NO: 8504 - protein, 574 aa, Artificial Sequence
  source: /note="Description of Artificial Sequence: Synthetic polypeptide"
MEETRELQSLAAAVMPSAQTLKITDFSFSDFELSDLETALCTIRMFTDLNLVQNFQMKHEVLCRWILSVKKNYRKNVAYHNWRHAFNTAQCMFAALKAGKIQNKLTDLEILALLIAALSHDLDHRGVNNSYIQRSEHPLAQLYCHSIMEHHHFDQCLMILNSPGNQILSGLSIEEYKTTLKIIKQAILATDLALYIKRRGEFFELIRKNQFNLEDPHQKELFLAMLMTACDLSAITKPWPIQQRIAELVATEFFDQGDRERKELNIEPTNLMNREKKNKIPSMQVGFIDAICLQLYEALTHVSEDCFPLLDGCRKNRQKWQALAEQQGGSGGGSGGVSKGAELFTGIVPILIELNGDVNGHKFSVSGEGEGDATYGKLTLKFICTTGKLPVPWPTLVTTLSYGVQCFSRYPDHMKQHDFFKSAMPEGYIQERTIFFEDDGNYKSRAEVKFEGDTLVNRIELTGTDFKEDGNILGNKMEYNYNAHNVYIMTDKAKNGIKVNFKIRHNIEDGSVQLADHYQQNTPIGDGPVLLPDNHYLSTQSALSKDPNEKRDHMIYFGFVTAAAITHGMDELYK

SEQ ID NO: 8505 - protein, 574 aa, Artificial Sequence
  source: /note="Description of Artificial Sequence: Synthetic polypeptide"
MEETRELQSLAAAVVPSAQTRKITDFSFSDFELSDLETALCTIRMFTDLNLVQNFEMKHEVLCRWILSVKKNYRKNVAYHNWRHAFNTAQCMFAALKAGKIQNKLTDLEILALLIAALSHDLDHRGVNNSYIQRSEHPLAQLYCHSIMEHHHFDQCLMILNSPGNQILSGLSIEEYKTTLKIIKQAILATDLALYIKRRGEFFELIRKNQFNLEDPHQKELFLAMLMTACDLSAITKPWPIQQRIAELVATEFFDQGDRERKELNIEPTDLMNREKKNKIPSMQVGFIDTICLQLYEALTHVSEDCFPLLDGCRKNRQKWQALAEQQGGSGGGSGGVSKGAELFTGIVPILIELNGDVNGHKFSVSGEGEGDATYGKLTLKFICTTGKLPVPWPTLVTTLSYGVQCFSRYPDHMKQHDFFKSAMPEGYIQERTIFFEDDGNYKSRAEVKFEGDTLVNRIELTGTDFKEDGNILGNKMEYNYNAHNVYIMTDKAKNGIKVNFKIRHNIEDGSVQLADHYQQNTPIGDGPVLLPDNHYLSTQSALSKDPNEKRDHMIYFGFVTAAAITHGMDELYK

SEQ ID NO: 8506 - protein, 574 aa, Artificial Sequence
  source: /note="Description of Artificial Sequence: Synthetic polypeptide"
MEETRELQSLAAAVVPSAQTLKITDFSFSDFELSDLEIALCTIRMFTDLNLVQNFQMKHEVLCRWILSVKRNYRKNVAYHNWRHAFNTAQCMFAALKAGKIQNKLTDLEILALLIAALSHDLDHRGVNNSYIQRSEHPLAQLYCHSIMEHHHFDQCLMILNSPGNQILSGLSNEEYKTTLKIIKQAILATDLALYIKRRGEFFELIRKNQFNLEDPHQKELFLAMLMTACDLSAITKPWPIQQRIAELVATEFFDQGDRERRELNIEPTDLMNREKKNKIPSMQVGFIDAICLQLYEALTHVSEDCFPLLDGCRKNRQKWQALAEQQGGSGGGSGGVSKGAELFTGIVPILIELNGDVNGHKFSVSGEGEGDATYGKLTLKFICTTGKLPVPWPTLVTTLSYGVQCFSRYPDHMKQHDFFKSAMPEGYIQERTIFFEDDGNYKSRAEVKFEGDTLVNRIELTGTDFKEDGNILGNKMEYNYNAHNVYIMTDKAKNGIKVNFKIRHNIEDGSVQLADHYQQNTPIGDGPVLLPDNHYLSTQSALSKDPNEKRDHMIYFGFVTAAAITHGMDELYK

SEQ ID NO: 8507 - protein, 574 aa, Artificial Sequence
  source: /note="Description of Artificial Sequence: Synthetic polypeptide"
MEETRELQSLAAAVVPSAQTLKITDFSFSDFELSDLETALCTIRMFTDLNLVQNFQMKHEVLCRWILSVKKNYRKNVAYHNWRHAFNTAQCMFAALKAGKIQNKLTDLEILALLIAALSHDLDHRAVNNSYIQRSEHPLAQLYCHSIMEHHHFDQCLMILNSPGNQILSGLSIEEYKTTLKIIKQAILATDLALYIKRRGEFFELIRKNQFNLEDPHQKELFLAMLMTACDLSAITKPWPIQQRIAELVAIEFFDQGDRERKELNIEPTDLMNREKKNKIPSMQVGFIDAICLQLYEALTHVSEDCFPLLDGCRKNRQKWQALAEQQGGSGGGSGGVSKGAELFTGIVPILIELNGDVNGHKFSVSGEGEGDATYGKLTLKFICTTGKLPVPWPTLVTTLSYGVQCFSRYPDHMKQHDFFKSAMPEGYIQERTIFFEDDGNYKSRAEVKFEGDTLVNRIELTGTDFKEDGNILGNKMEYNYNAHNVYIMTDKAKNGIKVNFKIRHNIEDGSVQLADHYQQNTPIGDGPVLLPDNHYLSTQSALSKDPNEKRDHMIYFGFVTAAAITHGMDELYK

SEQ ID NO: 8508 - protein, 574 aa, Artificial Sequence
  source: /note="Description of Artificial Sequence: Synthetic polypeptide"
MEETRELQSLAAAVVPSAQTLKITDFSFSDFELSDLETALCTIRMFTDLNLVQNFQMKHEVLCRWILSVKKNYRKNVAYHNWRHAFNTAQCMFAALKAGKIQNKLTDLEILALLIAALSHDLDHRGVNNSYIHRSEHPLAQLYCHSIMEHHHFDQCLMILNSPGNQILSGLSIEEYKTTLKIIKQAILATDLALYIKRRGEFFELIRKNQFNLEDPHQKELFLAMLMTACDLSAITKPWPIQQRIAELVATEFFDQGDRERKELNIEPTDLMNREKKNKIPSMQVGFIDAICLQLYEALTHVSEDCFPLLDGCRKNRQKWQALAEQQGGSGGGSGGVSKGAELFTGIVPILIELNGDVNGHKFSVSGEGEGDATYGKLTLKFICTTGKLPVPWPTLVTTLSYGVQCFSRYPDHMKQHDFFKSAMPEGYIQERTIFFEDDGNYKSRAEVKFEGDTLVNRIELTGTDFKEDGNILGNKMEYNYNAHNVYIMTDKAKNGIKVNFKIRHNIEDGSVQLADHYQQNTPIGDGPVLLPDNHYLSTQSALSKDPNEKRDHMIYFGFVTAAAITHGMDELYK

SEQ ID NO: 8509 - protein, 574 aa, Artificial Sequence
  source: /note="Description of Artificial Sequence: Synthetic polypeptide"
MEETRELQSLAAAVVPSAQTLKITDFSFSDFELSDLETALCTIRMFTDLNLVQNFQMKHEVLCRWILSVKKNYRKNVAYHNWRLAFNTAQCMFAALKAGKIQNKLTDLEILALLIAALSHDLDHRGVNNSYIQRSEHPLAQLYCHSIMEHHHFDQCLMILNSPGNQILSGLSIEEYKTTLKIIKQAILVTDLALYIKRRGEFFELIRKNQFNLEDPHQKELFLAMLMTACDLSAITKPWPIQQRIAELVATEFFDQGDRERKELNIEPTDLMNREKKNKIPSMQVGFIDAICLQLYEALTHVSEDCFPLLDGCRKNRQKWQALAEQQGGSGGGSGGVSKGAELFTGIVPILIELNGDVNGHKFSVSGEGEGDATYGKLTLKFICTTGKLPVPWPTLVTTLSYGVQCFSRYPDHMKQHDFFKSAMPEGYIQERTIFFEDDGNYKSRAEVKFEGDTLVNRIELTGTDFKEDGNILGNKMEYNYNAHNVYIMTDKAKNGIKVNFKIRHNIEDGSVQLADHYQQNTPIGDGPVLLPDNHYLSTQSALSKDPNEKRDHMIYFGFVTAAAITHGMDELYK

SEQ ID NO: 8510 - protein, 574 aa, Artificial Sequence
  source: /note="Description of Artificial Sequence: Synthetic polypeptide"
MEETRELQSLAAAVVPSAQTLKITDFSFSDFELSDLETALCTIRMFTDLNLVQNFQMKHEVLCRWILSVKKNYRKYVAYHNWRHAFNTAQCMFAALKAGKIQNKLTDLEILALLIAALSHDLDHRGVNNSYIQRSEHPLAQLYCHSIMEHHHFDQCLMILNSPGNQILSGLSIEEYKTTLKIIKQAILATDLALYIKRRGEFFELIRKNQFNLEDPHQKELFLAMLMTACDLSAITKPWPIQQRIAELVATEFFDQGDRERKELNLEPTDLMNREKKNKIPSMQVGFIDAICLQLYEALTHVSEDCFPLLDGCRKNRQKWQALAEQQGGSGGGSGGVSKGAELFTGIVPILIELNGDVNGHKFSVSGEGEGDATYGKLTLKFICTTGKLPVPWPTLVTTLSYGVQCFSRYPDHMKQHDFFKSAMPEGYIQERTIFFEDDGNYKSRAEVKFEGDTLVNRIELTGTDFKEDGNILGNKMEYNYNAHNVYIMTDKAKNGIKVNFKIRHNIEDGSVQLADHYQQNTPIGDGPVLLPDNHYLSTQSALSKDPNEKRDHMIYFGFVTAAAITHGMDELYK

SEQ ID NO: 8511 - protein, 574 aa, Artificial Sequence
  source: /note="Description of Artificial Sequence: Synthetic polypeptide"
MEETRELQSLAAAVVPSAQTLKITDFSLSDFELSDLETALCTIRMFTDLNLVQNFQMKHEVLCRWILSVKKNYRKNVAYHNWRHAFNTAQCMFAALKAGKIQNKLTDLEILALLIAALSHDLDHRAVNNSYIQRSEHPLAQLYCHSIMEHHHFDQCLMILNSPGNQILSGLSIEEYKTTLKIIKQAILATDLALYIKRRGEFFELIRKNQFNLEDPHQKELFLAMLMTACDLSAITKPWPIQQRIAELVAIEFFDQGDRERKELNIEPTDLMNREKKNKIPSMQVGFIDAICLQLYEALTHVSEDCFPLLDGCRKNRQKWQALAEQQGGSGGGSGGVSKGAELFTGIVPILIELNGDVNGHKFSVSGEGEGDATYGKLTLKFICTTGKLPVPWPTLVTTLSYGVQCFSRYPDHMKQHDFFKSAMPEGYIQERTIFFEDDGNYKSRAEVKFEGDTLVNRIELTGTDFKEDGNILGNKMEYNYNAHNVYIMTDKAKNGIKVNFKIRHNIEDGSVQLADHYQQNTPIGDGPVLLPDNHYLSTQSALSKDPNEKRDHMIYFGFVTAAAITHGMDELYK

SEQ ID NO: 8512 - protein, 574 aa, Artificial Sequence
  source: /note="Description of Artificial Sequence: Synthetic polypeptide"
MEETRELQSLAAAVVPSAQTLKITDFSFSDFELSDLETALCTIRMFTDLNLVQNFQMKHEVLCRWILSVKKNYRKNVAYHNWRHAFNTAQCMFAALKAGKIQNKLTDLEILALLIAALSHDLDHRGVNNSYIQRSEHPLAQLYCHSIMEHHHFDQCLMILNSPGNQILSGLSIEEYKTTLKIIKQAILATDLALYIKRRGEFFELIRKNQFNLEDPHQKELFLAMLMTACDLSAITKPWPIQQRIAELVATEFFDQGDRERNELNIEPTDLMNREKKNKIPSMQVGFIDAICLQLYEALTHVSEDCFPLLDGCRKNRQKWQALAEQQGGSGGGSGGVSKGAELFTGIVPILIELNGDVNGHKFSVSGEGEGDATYGKLTLKFICTTGKLPVPWPTLVTTLSYGVQCFSRYPDHMKQHDFFKSAMPEGYIQERTIFFEDDGNYKSRAEVKFEGDTLVNRIELTGTDFKEDGNILGNKMEYNYNAHNVYIMTDKAKNGIKVNFKIRHNIEDGSVQLADHYQQNTPIGDGPVLLPDNHYLSTQSALSKDPNEKRDHMIYFGFVTAAAITHGMDELYK

SEQ ID NO: 8513 - protein, 574 aa, Artificial Sequence
  source: /note="Description of Artificial Sequence: Synthetic polypeptide"
MEETRELQSLAAAVVPSAQTLKITDFSFSDFELSDLETALCTIRMFTDLNLVQNFQMKHEVLCRWILSVKKNYRKNVAYHNWRHAFNTAQCMFAALKAGKIQNKLTDLEILALLIAALSHDLDHRGVNNSYIQRSEHPLAQLYCHSIMEHHHFDQCLMILNSPGNQILSGLSIEEYKTTLKIIKQAILATDLALYIKRRGEFFELIRKNQFNLEDPHQKELFLAMLMTACDLSAITQPWPIQQRIAELVATEFFDQGDRERKELNIEPTDLMNREKKNKIPSMQVGFIDAICLQLYEALTHVSEDCFPLLDGCRNNRQKWQALAEQQGGSGGGSGGVSKGAELFTGIVPILIELNGDVNGHKFSVSGEGEGDATYGKLTLKFICTTGKLPVPWPTLVTTLSYGVQCFSRYPDHMKQHDFFKSAMPEGYIQERTIFFEDDGNYKSRAEVKFEGDTLVNRIELTGTDFKEDGNILGNKMEYNYNAHNVYIMTDKAKNGIKVNFKIRHNIEDGSVQLADHYQQNTPIGDGPVLLPDNHYLSTQSALSKDPNEKRDHMIYFGFVTAAAITHGMDELYK

SEQ ID NO: 8514 - protein, 574 aa, Artificial Sequence
  source: /note="Description of Artificial Sequence: Synthetic polypeptide"
MEETRELQSLAAAVVPSAQTLKITDFSFSDFELSDLETALCTIRMFTDLNLVQNFQMKHEVLCRWILSVKKDYRKNVAYHNWRHAFNTAQCMFAALKAGKIQNKLTDLEILALLIAALSHDLDHRGVNNSYIQRSEHPLAQLYCHSIMEHHHFDQCLMILNSPGNQILSGLSIEEYKTTLKIIKQAILATDLALYIKRRGEFFELIRKNQFNLEDPHQKELFLAMLMTACDLSAITKPWPIQQRIAELVATEFFDQGDRERKELNIEPTDLMNREKKNKIPSMQVGFIDAICLQLYEALTHVSEDCFPLLDGCRKNRQKWQALAEQQGGSGGGSGGVSKGAELFTGIVPILIELNGDVNGHKFSVSGEGEGDATYGKLTLKFICTTGKLPVPWPTLVTTLSYGVQCFSRYPDHMKQHDFFKSAMPEGYIQERTIFFEDDGNYKSRAEVKFEGDTLVNRIELTGTDFKEDGNILGNKMEYNYNAHNVYIMTDKAKNGIKVNFKIRHNIEDGSVQLADHYQQNTPIGDGPVLLPDNHYLSTQSALSKDPNEKRDHMIYFGFVTAAAITHGMDELYK

SEQ ID NO: 8515 - protein, 574 aa, Artificial Sequence
  source: /note="Description of Artificial Sequence: Synthetic polypeptide"
MEETRELQSLAAAVVPSAQTLKITDFSFSDFELSDLETALCTIRMFTDLNLVQNFQMKHEVLCRWILSVKKNYRKNVAYHNWRHAFNTAQCMFAALKAGKIQNKLTDLEILALLIAALSHDLDHRGVNNSYIQRSEHPLAQLYCHSSMEHHHFDQCLMILNSPGNQILSGLSIEEYKTTLKIIKQAILATDLALYIKRRGEFFELIRKNQFNLEDPHQKELFLAMLMTACDLSAITKPWPIQQRIAELVATEFFDQGDRERKELNIEPTDLMNREKKNKIPSMQVGFIDAICLQLYEALTHVSEDCFPLLDGCRKNRQKWQALAEQQGGSGGGSGGVSKGAELFTGIVPILIELNGDVNGHKFSVSGEGEGDATYGKLTLKFICTTGKLPVPWPTLVTTLSYGVQCFSRYPDHMKQHDFFKSAMPEGYIQERTIFFEDDGNYKSRAEVKFEGDTLVNRIELTGTDFKEDGNILGNKMEYNYNAHNVYIMTDKAKNGIKVNFKIRHNIEDGSVQLADHYQQNTPIGDGPVLLPDNHYLSTQSALSKDPNEKRDHMIYFGFVTAAAITHGMDELYK

SEQ ID NO: 8516 - protein, 574 aa, Artificial Sequence
  source: /note="Description of Artificial Sequence: Synthetic polypeptide"
MEETRELQSLAAAVMPSAQTLKITDFSFSDFELSDLETALCTIRMFTDLNLVQNFQMKHEVLCRWILSVKKNYRKNVAYHNWRHAFNTAQCMFAALKAGKIQNKLTDLEILALLIAALSHDLDHRGVNNSYIQRSEHPLAQLYCHSIMEHHHFDQCLMILNSPGNQILSGLSIEEYKTTLKIIKQAILATDLALYIKRRGEFFELIRKNQFNLEDPHQKELFLAMLMTACDLSAITKPWPIQQRIAELVATEFFDQGDRERKELNIEPTDLMNREKKNKIPSMQVGIIDAICLQLYEALTHVSEDCFPLLDGCRKNRQKWQALAEQQGGSGGGSGGVSKGAELFTGIVPILIELNGDVNGHKFSVSGEGEGDATYGKLTLKFICTTGKLPVPWPTLVTTLSYGVQCFSRYPDHMKQHDFFKSAMPEGYIQERTIFFEDDGNYKSRAEVKFEGDTLVNRIELTGTDFKEDGNILGNKMEYNYNAHNVYIMTDKAKNGIKVNFKIRHNIEDGSVQLADHYQQNTPIGDGPVLLPDNHYLSTQSALSKDPNEKRDHMIYFGFVTAAAITHGMDELYK

SEQ ID NO: 8517 - protein, 574 aa, Artificial Sequence
  source: /note="Description of Artificial Sequence: Synthetic polypeptide"
MEETRELQSLAAAVVPSAQTLKITDFSFSDFELSDLETALCTIRMFTDLNLVQNFQMKHEVLCRWILSVKKNYRKNVAYHNWRHAFNTAQCMFAALKAGKIQNKLTDLEILALLIAALSHDLDHRGVNNSYIQRSEHPLAQLYCHSIMEHHHFDQCLMILNSPGNQILSGLSIEEYKTTLKIIKQAILATDLALYIKRRGEFFELIRKNQFNLEDPHQKELFLAMLMTACDLSAITKPWPIQQRIAELVATEFFDQGDRERKELNLEPTDLMNREKKNKIPSMQVGFIDAICLQLYEALTHVSEDCFPLLDGCRKNRQKWQALAEQQGGSGGGSGGVSKGAELFTGIVPILIELNGDVNGHKFSVSGEGEGDATYGKLTLKFICTTGKLPVPWPTLVTTLSYGVQCFSRYPDHMKQHDFFKSAMPEGYIQERTIFFEDDGNYKSRAEVKFEGDTLVNRIELTGTDFKEDGNILGNKMEYNYNAHNVYIMTDKAKNGIKVNFKIRHNIEDGSVQLADHYQQNTPIGDGPVLLPDNHYLSTQSALSKDPNEKRDHMIYFGFVTAAAITHGMDELYK

SEQ ID NO: 8518 - protein, 574 aa, Artificial Sequence
  source: /note="Description of Artificial Sequence: Synthetic polypeptide"
MEETRELQSLAAAVVPSAQTLKITDFSFSDFELSDLETALCTIRMFTDLNLVQNFQMKHEVLCRWILSVKKNYQKNVAYHNWRHAFNTAQCMFAALKAGKIQNKLTDLEILALLIAALSHDLDHRGVNNSYIQRSEHPLAQLYCHSIMEHHHFDQCLMILNSPGNQILSGLSIEEYKTTLKIIKQAILATDLALYIKRRGEFFELIRKNQFNLEDPHQKELFLAMLMTACDLSAITKPWPIQQRIAELVATEFFDQGDRERKELNIEPTDLMNREKKNKIPSMQVGFIDAICLQLYEALTHVSEDCFPLLDGCRKNRQKWQALAEQQGGSGGGSGGVSKGAELFTGIVPILIELNGDVNGHKFSVSGEGEGDATYGKLTLKFICTTGKLPVPWPTLVTTLSYGVQCFSRYPDHMKQHDFFKSAMPEGYIQERTIFFEDDGNYKSRAEVKFEGDTLVNRIELTGTDFKEDGNILGNKMEYNYNAHNVYIMTDKAKNGIKVNFKIRHNIEDGSVQLADHYQQNTPIGDGPVLLPDNHYLSTQSALSKDPNEKRDHMIYFGFVTAAAITHGMDELYK

SEQ ID NO: 8519 - protein, 574 aa, Artificial Sequence
  source: /note="Description of Artificial Sequence: Synthetic polypeptide"
MEETRELQSLAAAVVPFAQTRKITDFSFSDFELSDLETALCTIRMFTDLNLVQNFQMKHEVLCRWILSVKKNYRKNVAYHNWRHAFNTAQCMFAALKAGKIQNKLTDLEILALLIAALSHDLDHRGVNNSYIQRSEHPLAQLYCHSIMEHHHFDQCLMILNSPGNQILSGLSIEEYKTTLKIIKQAILATDLALYIKRRGEFFELIRKNQFNLEDPHQKELFLAMLMTACDLSAITKPWPIQQRIAELVATEFFDQGDRERKELNIEPTDLMNREKKNKIPSMQVGFIDAICLQLYEALTHVSEDCFPLLDGCRKNRQKWQALAEQQGGSGGGSGGVSKGAELFTGIVPILIELNGDVNGHKFSVSGEGEGDATYGKLTLKFICTTGKLPVPWPTLVTTLSYGVQCFSRYPDHMKQHDFFKSAMPEGYIQERTIFFEDDGNYKSRAEVKFEGDTLVNRIELTGTDFKEDGNILGNKMEYNYNAHNVYIMTDKAKNGIKVNFKIRHNIEDGSVQLADHYQQNTPIGDGPVLLPDNHYLSTQSALSKDPNEKRDHMIYFGFVTAAAITHGMDELYK

SEQ ID NO: 8520 - protein, 574 aa, Artificial Sequence
  source: /note="Description of Artificial Sequence: Synthetic polypeptide"
MEETRELQSLAAAVVSSAQTLKITDFSFSDIELSDLETALCTIRMFTDLNLVQNFQMKHEVLCRWILSVKKNYRKNVAYHNWRHAFNTAQCMFAALKAGKIQNKLTDLEILALLIAALSHDLDHHGVNNSYIQRSEHPLAQLYCHSIMEHHHFDQCLMILNSPGNQILSGLSIEEYKTTLKIIKQAILATDLALYIKRRGEFFELIRKNQFNLEDPHQKELFLAMLMTACDLSAITKPWPIQQRITELVATEFFDQGDRERKELNIEPTDLMNREKKNKIPSMQVGFIDAICLQLYEALTHVSEDCFPLLDGCGKNRQKWQALAEQQGGSGGGSGGVSKGAELFTGIVPILIELNGDVNGHKFSVSGEGEGDATYGKLTLKFICTTGKLPVPWPTLVTTLSYGVQCFSRYPDHMKQHDFFKSAMPEGYIQERTIFFEDDGNYKSRAEVKFEGDTLVNRIELTGTDFKEDGNILGNKMEYNYNAHNVYIMTDKAKNGIKVNFKIRHNIEDGSVQLADHYQQNTPIGDGPVLLPDNHYLSTQSALSKDPNEKRDHMIYFGFVTAAAITHGMDELYK

SEQ ID NO: 8521 - DNA, 1704 bp, Artificial Sequence
  source: /note="Description of Artificial Sequence: Synthetic polynucleotide"
atggtgagcaagggcgccgagctgttcaccggcatcgtgcccatcctgatcgagctgaatggcgatgtgaatggccacaagttcagcgtgagcggcgagggcgagggcgatgccacctacggcaagctgaccctgaagttcatctgcaccaccggcaagctgcctgtgccctggcccaccctggtgaccaccctgagctacggcgtgcagtgcttctcacgctaccccgatcacatgaagcagcacgacttcttcaagagcgccatgcctgagggctacatccaggagcgcaccatcttcttcgaggatgacggcaactacaagtcgcgcgccgaggtgaagttcgagggcgataccctggtgaatcgcatcgagctgaccggcaccgatttcaaggaggatggcaacatcctgggcaataagatggagtacaactacaacgcccacaatgtgtacatcatgaccgacaaggccaagaatggcatcaaggtgaacttcaagatccgccacaacatcgaggatggcagcgtgcagctggccgaccactaccagcagaatacccccatcggcgatggccctgtgctgctgcccgataaccactacctgtccacccagagcgccctgtccaaggaccccaacgagaagcgcgatcacatgatctacttcggcttcgtgaccgccgccgccatcacccacggcatggatgagctgtacaagagtggtgaagaaacaagagagctacagtcgttagcggctgctgtggtgccatctgcccagacccttaaaattactgactttagcttcagtgactttgagctgtctgatctggaaacagcactgtgtacaattcggatgtttactgacctcaaccttgtgcagaacttccagatgaaacatgaggttctttgcagatggattttaagtgttaagaagaattatcggaagaatgttgcctatcataattggagacatgcctttaatacagctcagtgcatgtttgctgctctaaaagcaggcaaaattcagaacaagctgactgacctggagatacttgcattgctgattgctgcactaagccacgatttggatcaccgtggtgtgaataactcttacatacagcgaagtgaacatccacttgcccagctttactgccattcaatcatggcccaccatcattttgaccagtgcctgatgattcttaatagtccaggcaatcagattctcagtggcctctccattgaagaatataagaccacgttgaaaataatcaagcaagctattttagctacagacctagcactgtacattaagaggcgaggagaattttttgaacttataagaaaaaatcaattcaatttggaagatcctcatcaaaaggagttgtttttggcaatgctgatgacagcttgtgatctttctgcaattacaaaaccctggcctattcaacaacggatagcagaacttgtagcaactgaattttttgatcaaggagacagagagagaaaagaactcaacatagaacccactgatctaatgaacagggagaagaaaaacaaaatcccaagtatgcaagttgggttcatagatgccatctgcttgcaactgtatgaggccctgacccacgtgtcagaggactgtttccctttgctagatggctgcagaaagaacaggcagaaatggcaggcccttgcagaacagcagtga

SEQ ID NO: 8522 - DNA, 1704 bp, Artificial Sequence
  source: /note="Description of Artificial Sequence: Synthetic polynucleotide"
atggtgagcaagggcgccgagctgttcaccggcatcgtgcccatcctgatcgagctgaatggcgatgtgaatggccacaagttcagcgtgagcggcgagggcgagggcgatgccacctacggcaagctgaccctgaagttcatctgcaccaccggcaagctgcctgtgccctggcccaccctggtgaccaccctgagctacggcgtgcagtgcttctcacgctaccccgatcacatgaagcagcacgacttcttcaagagcgccatgcctgagggctacatccaggagcgcaccatcttcttcgaggatgacggcaactacaagtcgcgcgccgaggtgaagttcgagggcgataccctggtgaatcgcatcgagctgaccggcaccgatttcaaggaggatggcaacatcctgggcaataagatggagtacaactacaacgcccacaatgtgtacatcatgaccgacaaggccaagaatggcatcaaggtgaacttcaagatccgccacaacatcgaggatggcagcgtgcagctggccgaccactaccagcagaatacccccatcggcgatggccctgtgctgctgcccgataaccactacctgtccacccagagcgccctgtccaaggaccccaacgagaagcgcgatcacatgatctacttcggcttcgtgaccgccgccgccatcacccacggcatggatgagctgtacaagagtggtgaagaaacaagagagctacagtcgttagcggctgctgtggtgccatctgcccagacccttaaaattactgactttagcttcagtgactttgagctgtctgatctggaaacagcactgtgtacaattcggatgtttactgacctcaaccttgtgcagaacttccagatgaaacatgaggttctttgcagatggattttaagtgttaagaagaattatcggaagaatgttgcctatcataattggagacatgcctttaatacagctcagtgcatgtttgctgctctaaaagcaggcaaaattcagaacaagctgactgacctggagatacttgcattgctgattgctgcactaagccacgatttggatcaccgtggtgtgaataactcttacatacagcgaagtgaacatccacttgcccagctttactgccattcaatcatggaacaccatcattttgaccagtgcctgatgattcttaatagtccaggcaatcagattctcagtggcctctccattgaagaatataagaccacgttgaaaataatcaagcaagctattttagctacagccctagcactgtacattaagaggcgaggagaattttttgaacttataagaaaaaatcaattcaatttggaagatcctcatcaaaaggagttgtttttggcaatgctgatgacagcttgtgatctttctgcaattacaaaaccctggcctattcaacaacggatagcagaacttgtagcaactgaattttttgatcaaggagacagagagagaaaagaactcaacatagaacccactgatctaatgaacagggagaagaaaaacaaaatcccaagtatgcaagttgggttcatagatgccatctgcttgcaactgtatgaggccctgacccacgtgtcagaggactgtttccctttgctagatggctgcagaaagaacaggcagaaatggcaggcccttgcagaacagcagtga

SEQ ID NO: 8523 - DNA, 1725 bp, Artificial Sequence
  source: /note="Description of Artificial Sequence: Synthetic polynucleotide"
atggaagaaacaagagagctacagtcgttagcggctgctgtggtgccatctgcccagacccttaaaattactgactttagcttcagtgactttgagctgtctgatctggaaacagcactgtgtacaattcggatgtttactgacctcaaccttgtgcagaacttccagatgaaacatgaggttctttgcagatggattttaagtgttaagaagaattatcggaagaatgttgcctatcataattggagacatgcctttaatacagctcagtgcatgtttgctgctctaaaagcaggcaaaattcagaacaagctgactgacctggagatacttgcattgctgattgctgcactaagccacgatttggatcaccgtggtgtgagtaactcttacatacagcgaagtgaacatccacttgcccaactttactgccattcaatcatggaacaccatcattttgaccagtgcctgatgattcttaatagtccaggcaatcagattctcagtggcctctccattgaagaatataagaccacgttgaaaataatcaagcaagctattttagctacagacctagcactgtacattaagaggcgaggagaattttttgaacttataagaaaaaatcaattcaatttggaagatcctcatcaaaaggaattgtttttggcaatgctgatgacagcttgtgatctttctgcaattacaaaaccctggcctattcaacaacggatagcagaacttgtagcaactgaattttttgatcaaggagacagagagagaaaagaactcaacatagaacccactgatctaatgaacagggagaagaaaaacaaaatcccaagtatgcaagttgggttcatagatgccatctgcttgcaactgtatgaggccctgacccacgtgtcagaggactgtttccctttgctagatggctgcagaaagaacaggcagaaatggcaggcccttgcagaacagcagggaggtagtggtggaggcagtggtggagtgagcaagggcgccgagctgttcaccggcatcgtgcccatcctgatcgagctgaatggcgatgtgaatggccacaagttcagcgtgagcggcgagggcgagggcgatgccacctacggcaagctgaccctgaagttcatctgcaccaccggcaagctgcctgtgccctggcccaccctggtgaccaccctgagctacggcgtgcagtgcttctcacgctaccccgatcacatgaagcagcacgacttcttcaagagcgccatgcctgagggctacatccaggagcgcaccatcttcttcgaggatgacggcaactacaagtcgcgcgccgaggtgaagttcgagggcgataccctggtgaatcgcatcgagctgaccggcaccgatttcaaggaggatggcaacatcctgggcaataagatggagtacaactacaacgcccacaatgtgtacatcatgaccgacaaggccaagaatggcatcaaggtgaacttcaagatccgccacaacatcgaggatggcagcgtgcagctggccgaccactaccagcagaatacccccatcggcgatggccctgtgctgctgcccgataaccactacctgtccacccagagcgccctgtccaaggaccccaacgagaagcgcgatcacatgatctacttcggcttcgtgaccgccgccgccatcacccacggcatggatgagctgtacaagtga

SEQ ID NO: 8524 - DNA, 1725 bp, Artificial Sequence
  source: /note="Description of Artificial Sequence: Synthetic polynucleotide"
atggaagaaacaagagagctacagtcgttagcggctgctgtggtgccatctgcccagacccttaaaattactgactttagcttcagtgactttgagctgtctgatatggaaacagcactgtgtacaattcggatgtttactgacctcaaccttgtgcagaacttccagatgaaacatgaggttctttgcagatggattttaagtgttaagaagaattatcggaagaatgttgcctatcataattggagacatgcctttaatacagctcagtgcatgtttgctgctctaaaagcaggcaaaattcagaacaagctgactgacctggagatacttgcattgctgattgctgcactaagccacgatttggatcaccgtggtgtgaataactcttacatacagcgaagtgaacatccacttgcccagctttactgccattcaatcatggaacaccatcattttgaccagtgcctgatgattcttaatagtccaggcaatcagattctcagtggcctctccattgaagaatataagaccacgttgaaaataatcaagcaagctattttagctacagacctagcactgtacattaagaggcgaggagaattttttgaacttataagaaaaaatcaattcaatttggaagatcctcatcaaaaggagttgtttttggcaatgctgatgacagcttgtgatctttctgcaattacaaaaccctggcctattcaacaacggatagcagaacttgtagcaactgaattttttgatcaaggagacagagagagaaaagaactcaacatagaacccactgatctaatgaacagggagaagaaaaacaaaatcccaagtatgcaagttgggttcatagatgccatctgcttgcaactgtatgaggccctgagccacgtgtcagaggactgtttccctttgctagatggctgcagaaagaacaggcagaaatggcaggcccttgcagaacagcagggaggtagtggtggaggcagtggtggagtgagcaagggcgccgagctgttcaccggcatcgtgcccatcctgatcgagctgaatggcgatgtgaatggccacaagttcagcgtgagcggcgagggcgagggcgatgccacctacggcaagctgaccctgaagttcatctgcaccaccggcaagctgcctgtgccctggcccaccctggtgaccaccctgagctacggcgtgcagtgcttctcacgctaccccgatcacatgaagcagcacgacttcttcaagagcgccatgcctgagggctacatccaggagcgcaccatcttcttcgaggatgacggcaactacaagtcgcgcgccgaggtgaagttcgagggcgataccctggtgaatcgcatcgagctgaccggcaccgatttcaaggaggatggcaacatcctgggcaataagatggagtacaactacaacgcccacaatgtgtacatcatgaccgacaaggccaagaatggcatcaaggtgaacttcaagatccgccacaacatcgaggatggcagcgtgcagctggccgaccactaccagcagaatacccccatcggcgatggccctgtgctgctgcccgataaccactacctgtccacccagagcgccctgtccaaggaccccaacgagaagcgcgatcacatgatctacttcggcttcgtgaccgccgccgccatcacccacggcatggatgagctgtacaagtga

SEQ ID NO: 8525 - DNA, 1725 bp, Artificial Sequence
  source: /note="Description of Artificial Sequence: Synthetic polynucleotide"
atggaagaaacaagagagctacagtcgttagcggctgctgtggtgccatctgcccagacccttaaaattactgactttagcttcagtgactttgagctgtctgatctggaaacagcactgtgtacaattcggatgtttactgacctcaaccttgtgcagaacttccagatgaaacatgaggttctttgcagatggattttaagtgttaagaagaattatcggaagaatgttgcctatcataattggagacatgcctttaatacagctcagtgcatgtttgctgctctaaaagcaggcaaaattcagaacaagctgactgacctggagatacttgcattgctgattgctgcactaagccacgatttggatcaccgtggtgtgaataactcttacatacagcgaagtgaacatccacttgcccagctttactgccattcaatcatggaacaccatcattttgaccagtgcctgatgattcttaatagtccaggcaatcagattctcagtggcctctccattgaagaatataagaccacgttgaaaataatcaagcaagctattttagctacagacctagcactgtacattaagaggcgaggagaattttttgaacttataagaaaaaatcaattcaatttggaagatcctcatcaaaaggagttgtttttggcaatgctgatgacagcttgtgatctttctgcaaatacaaaaccctggcctattcaacaacggatagcagaacttgtagcaactgaattttttgatcaaggagacagagagagaaaagaactcaacatagaacccactgatctaatgaacagggagaagaaaaacaaaatcccaagtatgcaagttgggttcatagatgccatctgcttgcaactgtatgaggccctgacccacgtgtcagaggactgtttccctttgctagatggctgcagaaagaacaggcagaaatggcaggcccttgcagaacagcagggaggtagtggtggaggcagtggtggagtgagcaagggcgccgagctgttcaccggcatcgtgcccatcctgatcgagctgaatggcgatgtgaatggccacaagttcagcgtgagcggcgagggcgagggcgatgccacctacggcaagctgaccctgaagttcatctgcaccaccggcaagctgcctgtgccctggcccaccctggtgaccaccctgagctacggcgtgcagtgcttctcacgctaccccgatcacatgaagcagcacgacttcttcaagagcgccatgcctgagggctacatccaggagcgcaccatcttcttcgaggatgacggcaactacaagtcgcgcgccgaggtgaagttcgagggcgataccctggtgaatcgcatcgagctgaccggcaccgatttcaaggaggatggcaacatcctgggcaataagatggagtacaactacaacgcccacaatgtgtacatcatgaccgacaaggccaagaatggcatcaaggtgaacttcaagatccgccacaacatcgaggatggcagcgtgcagctggccgaccactaccagcagaatacccccatcggcgatggccctgtgctgctgcccgataaccactacctgtccacccagagcgccctgtccaaggaccccaacgagaagcgcgatcacatgatctacttcggcttcgtgaccgccgccgccatcacccacggcatggatgagctgtacaagtga

SEQ ID NO: 8526 - DNA, 1725 bp, Artificial Sequence
  source: /note="Description of Artificial Sequence: Synthetic polynucleotide"
atggaagaaacaagagagctacagtcgttagcggctgctgtggtgccatctgcccagacccttaaaattactgactttagcttcagtgactttgagctgtctgatctggaaacagcactgtgtacaattcggatgtttactgacctcaaccttgtgcagaacttccagatgaaacatgaggttctttgcagatggattttaagtgttaagaagaattattggaagaatgttgcctatcataattggagacatgcctttaatacagctcagtgcatgtttgctgctctaaaagcaggcaaaattcagaacaagctgactgacctggagatacttgcattgctgattgctgcactaagccacgatttggatcaccgtggtgtgaataactcttacatacagcgaagtgaacatccacttgcccagctttactgccattcaatcatggaacaccatcattttgaccagtgcctgatgattcttaatagtccaggcaatcagattctcagtggcctctccattgaagaatataagaccacgttgaaaataatcaagcaagctattttagctacagacctagcactgtacattaagaggcgaggagaattttttgaacttataagaaaaaatcaattcaatttggaagatcctcatcaaaaggagttgtttttggcaatgctgatgacagcttgtgatctttctgcaattacaaaaccctggcctattcaacaacggatagcagaacttgtagcaactgaattttttgatcaaggagacagagagagaaaagaactcaacatagaacccacagatctaatgaacagggagaagaaaaacaaaatcccaagtatgcaagttgggttcatagatgccatctgcttgcaactgtatgaggccctgacccacgtgtcagaggactgtttccctttgctagatggctgcagaaagaacaggcagaaatggcaggcccttgcagaacagcagggaggtagtggtggaggcagtggtggagtgagcaagggcgccgagctgttcaccggcatcgtgcccatcctgatcgagctgaatggcgatgtgaatggccacaagttcagcgtgagcggcgagggcgagggcgatgccacctacggcaagctgaccctgaagttcatctgcaccaccggcaagctgcctgtgccctggcccaccctggtgaccaccctgagctacggcgtgcagtgcttctcacgctaccccgatcacatgaagcagcacgacttcttcaagagcgccatgcctgagggctacatccaggagcgcaccatcttcttcgaggatgacggcaactacaagtcgcgcgccgaggtgaagttcgagggcgataccctggtgaatcgcatcgagctgaccggcaccgatttcaaggaggatggcaacatcctgggcaataagatggagtacaactacaacgcccacaatgtgtacatcatgaccgacaaggccaagaatggcatcaaggtgaacttcaagatccgccacaacatcgaggatggcagcgtgcagctggccgaccactaccagcagaatacccccatcggcgatggccctgtgctgctgcccgataaccactacctgtccacccagagcgccctgtccaaggaccccaacgagaagcgcgatcacatgatctacttcggcttcgtgaccgccgccgccatcacccacggcatggatgagctgtacaagtga

SEQ ID NO: 8527 - DNA, 1725 bp, Artificial Sequence
  source: /note="Description of Artificial Sequence: Synthetic polynucleotide"
atggaagaaacaagagagctacagtcgttagcggctgctgtggtgccatctgcccagacccttaaaattactgactttagcttcagtgactttgagctgtctgatctggaaacagcactgtgtacaattcggatgtttactgacctcaaccttgtgcagaacttccagatgaaacatgaggttctttgcagatggattttaagtgttaagaagaattatcggaagaatgttgcctatcataattggagacatgcctttagtacagctcagtgcatgtttgctgctctaaaagcaggcaaaattcagaacaagctgactgacctggagatacttgcattgctgattgctgcactaagccacgatttggatcaccgtggtgtgaataactcttacatacagcgaagtgaacatccacttgcccagctttactgccattcaatcatggaacaccatcattttgaccagtgcctgatgattcttaatagtccaggcaatcagattctcagtggcctctccattgaagaatataagaccacgttgaaaataatcaagcaagctattttagctacagacctagcactgtacattaagaggcgaggagaattttttgaacttataagaaaaaatcaattcaatttggaagatcctcatcaaaaggagttgtttttggcaatgctgatgacagcttgtgatctttctgcaattacaaaaccctggcctattcaacaacggatagcagaacttgtagcaactgaattttttgatcaaggagacagagagagaaaagaactcaacatagaacccactgatctaatgaacagggagaagaaaaacaaaatcccaagtatgcaagttgggttcatagatgccatctgcttgcaactgtatgaggccctgacccacgtgtcagaggactgtttccctttgctagatggctgcagaaagaacaggcagaaatggcaggcccttgcagaacagcagggaggtagtggtggaggcagtggtggagtgagcaagggcgccgagctgttcaccggcatcgtgcccatcctgatcgagctgaatggcgatgtgaatggccacaagttcagcgtgagcggcgagggcgagggcgatgccacctacggcaagctgaccctgaagttcatctgcaccaccggcaagctgcctgtgccctggcccaccctggtgaccaccctgagctacggcgtgcagtgcttctcacgctaccccgatcacatgaagcagcacgacttcttcaagagcgccatgcctgagggctacatccaggagcgcaccatcttcttcgaggatgacggcaactacaagtcgcgcgccgaggtgaagttcgagggcgataccctggtgaatcgcatcgagctgaccggcaccgatttcaaggaggatggcaacatcctgggcaataagatggagtacaactacaacgcccacaatgtgtacatcatgaccgacaaggccaagaatggcatcaaggtgaacttcaagatccgccacaacatcgaggatggcagcgtgcagctggccgaccactaccagcagaatacccccatcggcgatggccctgtgctgctgcccgataaccactacctgtccacccagagcgccctgtccaaggaccccaacgagaagcgcgatcacatgatctacttcggcttcgtgaccgccgccgccatcacccacggcatggatgagctgtacaagtga

SEQ ID NO: 8528 - DNA, 1725 bp, Artificial Sequence
  source: /note="Description of Artificial Sequence: Synthetic polynucleotide"
atggaagaaacaagagagctacagtcgttagcggctgctgtggtgccatctgcccagacccgtaaaattactgactttagcttcagtgactttgagctgtctgatctggaaacagcactgtgtacaattcggatgtttactgacctcaaccttgtgcagaacttcgagatgaaacatgaggttctttgcagatggattttaagtgttaagaagaattatcggaagaatgttgcctatcataattggagacatgcctttaatacagctcagtgcatgtttgctgctctaaaagcaggcaaaattcagaacaagctgactgacctggagatacttgcattgctgattgctgcactaagccacgatttggatcaccgtggtgtgaataactcttacatacagcgaagtgaacatccacttgcccagctttactgccattcaatcatggaacaccatcattttgaccagtgcctgatcattcttaatagtccaggcaatcagattctcagtggcctctccattgaagaatataagaccacgttgaaaataatcaagcaagctattttagctacagacctagcactgtacattaagaggcgaggagaattttttgaacttataagaaaaaatcaattcaatttggaagatcctcatcaaaaggagttgtttttggcaatgctgatgacagcttgtgatctttctgcaattacaaaaccctggcctattcaacaacggatagcagaacttgtagcaactgaattttttgatcaaggagacagagagagaaaagaactcaacatagaacccactgatctaatgaacagggagaagaaaaacaaaatcccaagtatgcaagttgggttcatagatgccatctgcttgcaactgtatgaggccctgacccacgtgtcagaggactgtttccctttgctagatggctgcagaaagaacaggcagaaatggcaggcccttgcagaacagcagggaggtagtggtggaggcagtggtggagtgagcaagggcgccgagctgttcaccggcatcgtgcccatcctgatcgagctgaatggcgatgtgaatggccacaagttcagcgtgagcggcgagggcgagggcgatgccacctacggcaagctgaccctgaagttcatctgcaccaccggcaagctgcctgtgccctggcccaccctggtgaccaccctgagctacggcgtgcagtgcttctcacgctaccccgatcacatgaagcagcacgacttcttcaagagcgccatgcctgagggctacatccaggagcgcaccatcttcttcgaggatgacggcaactacaagtcgcgcgccgaggtgaagttcgagggcgataccctggtgaatcgcatcgagctgaccggcaccgatttcaaggaggatggcaacatcctgggcaataagatggagtacaactacaacgcccacaatgtgtacatcatgaccgacaaggccaagaatggcatcaaggtgaacttcaagatccgccacaacatcgaggatggcagcgtgcagctggccgaccactaccagcagaatacccccatcggcgatggccctgtgctgctgcccgataaccactacctgtccacccagagcgccctgtccaaggaccccaacgagaagcgcgatcacatgatctacttcggcttcgtgaccgccgccgccatcacccacggcatggatgagctgtacaagtga

SEQ ID NO: 8529 - DNA, 1725 bp, Artificial Sequence
  source: /note="Description of Artificial Sequence: Synthetic polynucleotide"
atggaagaaacaagagagctacagtcgttagcggctgctgtggtgccatctgcccagacccttaaaattactgactttagcttcagtgactttgagctgtctgatctggaaacagcactgtgtacaattcggatgtttactgacctcaaccttgtgcagaacttccagatgaaacatgaggttctttgcagatggattttaagtgttaagaagaattatcggaagaatgttgcctatcataatcggagacatgcctttaatacagctcagtgcatgtttgctgctctaaaagcaggcaaaattcagaacaagctgactgacctggagatacttgcattgctgattgctgcactaagccacgatttggatcaccgtggtgtgaataactcttacatacagcgaagtgaacatccacttgcccagctttactgccattcaatcatggaacaccatcattttgaccagtgcctgatgattcttaatagtccaggcaatcagattctcagtggcctctccattgaagaatataagaccacgttgaaaataatcaagcaagctattttagctagagacctagcactgtacattaagaggcgaggagaattttttgaacttataagaaaaaatcaattcaatttggaagatcctcatcaaaaggagttgtttttggcaatgctgatgacaacttgtgatctttctgcaattacaaaaccctggcctattcaacaacggatagcagaacttgtagcaactgaattttttgatcaaggagacagagagagaaaagaactcaacatagaacccactgatctaatgaacagggggaagaaaaacaaaatcccaagtatgcaagttgggttcatagatgccatctgcctgcaactgtatgaggccctgacccacgtgtcagaggactgtttccctttgctagatggctgcagaaagaacaggcagaaatggcaggcccttgcagaacagcagggaggtagtggtggaggcagtggtggagtgagcaagggcgccgagctgttcaccggcatcgtgcccatcctgatcgagctgaatggcgatgtgaatggccacaagttcagcgtgagcggcgagggcgagggcgatgccacctacggcaagctgaccctgaagttcatctgcaccaccggcaagctgcctgtgccctggcccaccctggtgaccaccctgagctacggcgtgcagtgcttctcacgctaccccgatcacatgaagcagcacgacttcttcaagagcgccatgcctgagggctacatccaggagcgcaccatcttcttcgaggatgacggcaactacaagtcgcgcgccgaggtgaagttcgagggcgataccctggtgaatcgcatcgagctgaccggcaccgatttcaaggaggatggcaacatcctgggcaataagatggagtacaactacaacgcccacaatgtgtacatcatgaccgacaaggccaagaatggcatcaaggtgaacttcaagatccgccacaacatcgaggatggcagcgtgcagctggccgaccactaccagcagaatacccccatcggcgatggccctgtgctgctgcccgataaccactacctgtccacccagagcgccctgtccaaggaccccaacgagaagcgcgatcacatgatctacttcggcttcgtgaccgccgccgccatcacccacggcatggatgagctgtacaagtga

SEQ ID NO: 8530 - DNA, 1725 bp, Artificial Sequence
  source: /note="Description of Artificial Sequence: Synthetic polynucleotide"
atggaagaaacaagagagctacagtcgttagcggctgctgtggtgccatctgcccagacccttaaaattactgactttagcttcagtgactttgagctgtctgatctggaaacagcactgtatacaattcggatgtttactgacctcaaccttgtgcagaacttccagatgaaacatgaggttctttgcagatggattttaagtgttaagaagaattatcggaagaatgttgcctatcataattggagacatgcctttaatacagctcagtgcatgtttgctgctctaaaagcaggcaaaattcagaacaagctgactgacctggagatacttgcattgctgattgctgcactaagccacgatttggatcaccgtggtgtgaataactcttacatacagcgaagtgaacatccacttgcccagctttactgccattcaatcatggaacaccatcattttgaccagtgcctgatgattcttaatagtccaggcaatcagattctcagtggcctctccattgaagaatataagaccacgttgaaaataatcaagcaagctattttagctacagacctagcactgtacattaagaggcgaggagaattttttgaacttataagaaaaaatcaattcaatttggaagatcctcatcaaaaggagttgtttttggcaatgctgatgacagcttgtgatctttctgcaattacaaaaccctggcctattcaacaacggatagcagaacttgtagcaactgaattttttgatcaaggagacagagagagaaaagaactcaacatagaacccactgatctaatgaacagggagaagaaaaacaaaatcccaagtatgcaagttgggttcatagatgccatctgcttgcaactgtatgaggccctgacccacgtgtcagaggactgtttccctttgctagatggctgcagaaagaacaggcagaaatggcaggcccttgcagaacagcagggaggtagtggtggaggcagtggtggagtgagcaagggcgccgagctgttcaccggcatcgtgcccatcctgatcgagctgaatggcgatgtgaatggccacaagttcagcgtgagcggcgagggcgagggcgatgccacctacggcaagctgaccctgaagttcatctgcaccaccggcaagctgcctgtgccctggcccaccctggtgaccaccctgagctacggcgtgcagtgcttctcacgctaccccgatcacatgaagcagcacgacttcttcaagagcgccatgcctgagggctacatccaggagcgcaccatcttcttcgaggatgacggcaactacaagtcgcgcgccgaggtgaagttcgagggcgataccctggtgaatcgcatcgagctgaccggcaccgatttcaaggaggatggcaacatcctgggcaataagatggagtacaactacaacgcccacaatgtgtacatcatgaccgacaaggccaagaatggcatcaaggtgaacttcaagatccgccacaacatcgaggatggcagcgtgcagctggccgaccactaccagcagaatacccccatcggcgatggccctgtgctgctgcccgataaccactacctgtccacccagagcgccctgtccaaggaccccaacgagaagcgcgatcacatgatctacttcggcttcgtgaccgccgccgccatcacccacggcatggatgagctgtacaagtga

SEQ ID NO: 8531 - DNA, 1725 bp, Artificial Sequence
  source: /note="Description of Artificial Sequence: Synthetic polynucleotide"
atggaagaaacaagagagctacagtcgttagcggctgctgtggtgccatctgcccagacccgtaaaattactgactttagcttcagtgactttgagctgtctgatctggaaacagcactgtgtacaattcggatgtttactgacctcaaccttgtgccgaacttccagatgaaacatgaggttctttgcagatggattttaagtgttaagaagaattatcggaagaatgttgcctatcataattggagacatgcctttaatacagctcagtgcatgtttgctgctctaaaagcaggcaaaattcagaacaagctgactgacctggagatacttgcattgctgattgctgcactaagccacgatttggatcaccgtggtgtgaataactcttacatacagcgaagcgaacatccacttgcccagctttactgccattcaatcatggaacaccatcattttgaccagtgcctgatgattcttaatagtccaggcaatcagattctcagtggcctctccattgaagaatataataccacgttgaaaataatcaagcaagctattttagctacagacctagcactgtacattgagaggcgaggagaattttttgaacttataagaaaaaatcaattcaatttggaagatcctcatcaaaaggagttgtttttggcaatgctgatgacagcttgtgatctttctgcaattacaaaaccctggcctattcaacaacggatagcagaacttgtagcaactgaattttttgatcaaggagacagagagagaaaagaactcaacatagaacccactgatctaatgaacagggagaagaaaaacaaaatcccaagtatgcaagttgggttcatagatgccatctgcttgcaactgtatgaggccctgacccacgtgtcagaggactgtttccctttgctagatggctgcagaaagaacaggcagaaatggcaggcccttgcagaacagcagggaggtagtggtggaggcagtggtggagtgagcaagggcgccgagctgttcaccggcatcgtgcccatcctgatcgagctgaatggcgatgtgaatggccacaagttcagcgtgagcggcgagggcgagggcgatgccacctacggcaagctgaccctgaagttcatctgcaccaccggcaagctgcctgtgccctggcccaccctggtgaccaccctgagctacggcgtgcagtgcttctcacgctaccccgatcacatgaagcagcacgacttcttcaagagcgccatgcctgagggctacatccaggagcgcaccatcttcttcgaggatgacggcaactacaagtcgcgcgccgaggtgaagttcgagggcgataccctggtgaatcgcatcgagctgaccggcaccgatttcaaggaggatggcaacatcctgggcaataagatggagtacaactacaacgcccacaatgtgtacatcatgaccgacaaggccaagaatggcatcaaggtgaacttcaagatccgccacaacatcgaggatggcagcgtgcagctggccgaccactaccagcagaatacccccatcggcgatggccctgtgctgctgcccgataaccactacctgtccacccagagcgccctgtccaaggaccccaacgagaagcgcgatcacatgatctacttcggcttcgtgaccgccgccgccatcacccacggcatggatgagctgtacaagtga

SEQ ID NO: 8532 - DNA, 1725 bp, Artificial Sequence
  source: /note="Description of Artificial Sequence: Synthetic polynucleotide"
atggaagaaacaagagagctacagtcgttagcggctgctgtggtgccatctgcccagacccttaaaattactgactttagcttcagtgactttgagctgtctgatctggaaacagcactgtgtacaattcggatgtttactgacctcaaccttgtgcagaacttccagatgaaacatgaggttctttgcagatggattttaagtgttaagaagaattatcggaagaatgttgcctatcgtaattggagacatgcctttaatacagctcagtgcatgtttgctgctctaaaagcaggcaaaattcagaacaagctgactgacctggagatacttgcattgctgattgctgcactaagccacgatttggatcaccgtggtgtgaataactcttacatacagcgaagtgaacatccacttgcccagctttactgccattcaatcatggaacaccatcattttgaccagtgcctgatgattcttaatagtccaggcaatcagattctcagtggcctctccattgaagaatataagaccacgttgaaaataatcaagcaagctattttagctacagacctagcactgtacattaagaggcgaggggaattttttgaacttataagaaaaaatcaattcaatttggaagatcctcatcaaaaggagttgtttttggcaatgctgatgacagcttgtgatctttctgcaattacaaaaccctggcctattcaacaacggatagcagaacttgtagcaactgaattttttgatcaaggagacagagagagaaaagaactcaacatagaacccactgatctaatgaacagggagaagaaaaacaaaatcccaagtatgcaagttgggttcatagatgccatctgcttgcaactgtatgaggccctgacccacgtgtcagaggactgtttccctttgctagatggctgcagaaagaacaggcagaaatggcaggcccttgcagaacagcagggaggtagtggtggaggcagtggtggagtgagcaagggcgccgagctgttcaccggcatcgtgcccatcctgatcgagctgaatggcgatgtgaatggccacaagttcagcgtgagcggcgagggcgagggcgatgccacctacggcaagctgaccctgaagttcatctgcaccaccggcaagctgcctgtgccctggcccaccctggtgaccaccctgagctacggcgtgcagtgcttctcacgctaccccgatcacatgaagcagcacgacttcttcaagagcgccatgcctgagggctacatccaggagcgcaccatcttcttcgaggatgacggcaactacaagtcgcgcgccgaggtgaagttcgagggcgataccctggtgaatcgcatcgagctgaccggcaccgatttcaaggaggatggcaacatcctgggcaataagatggagtacaactacaacgcccacaatgtgtacatcatgaccgacaaggccaagaatggcatcaaggtgaacttcaagatccgccacaacatcgaggatggcagcgtgcagctggccgaccactaccagcagaatacccccatcggcgatggccctgtgctgctgcccgataaccactacctgtccacccagagcgccctgtccaaggaccccaacgagaagcgcgatcacatgatctacttcggcttcgtgaccgccgccgccatcacccacggcatggatgagctgtacaagtga

SEQ ID NO: 8533 - DNA, 1725 bp, Artificial Sequence
  source: /note="Description of Artificial Sequence: Synthetic polynucleotide"
atggaagaaacaagagagctacagtcgttagcggctgctgtggtgccatctgcccagacccttaaaattactgactttagcttcagtgactttgagctgtctgatctggaaacagcactgtgtacaattcggatgtttactgacctcaaccttgtgctgaacttccagatgaaacatgaggttctttgcagatggattttaagtgttaagaagaattatcggaagaatgttgcctatcataattggagacatgcctttaatacagctcagtgcatgtttgctgctctaaaagcaggcaaaattcagaacaagctgactgacctggagatacttgcattgctgattgctgcactaagccacgatttggatcaccgtggtgtgaataactattacatacagcgaagtgaacatccacttgcccagctttactgccattcaatcatggaacaccatcattttgaccagtgcctgatgattcttaatagtccaggcaatcagattctcagtggcctctccattgaagaatataagaccacgttgaaaataatcaagcaagctattttagctacagacctagcactgtacattaagaggcgaggagaattttttgaacttataagaaaaaatcaattcaatttggaagatcctcatcaaaaggagttgtttttggcaatgctgatgacaacttgtgatctttctgcaattacaaaaccctggcctattcaacaacggatagcagaacttgtagcaactgaattttttgatcaaggagacagagagagaaaagaactcaacatagaacccactgatctaatgaacagggggaagaaaaacaaaatcccaagtatgcaagttgggttcatagatgccatctgcctgcaactgtatgaggccctgacccacgtgtcagaggactgtttccctttgctagatggctgcagaaagaacaggcagaaatggcaggcccttgcagaacagcagggaggtagtggtggaggcagtggtggagtgagcaagggcgccgagctgttcaccggcatcgtgcccatcctgatcgagctgaatggcgatgtgaatggccacaagttcagcgtgagcggcgagggcgagggcgatgccacctacggcaagctgaccctgaagttcatctgcaccaccggcaagctgcctgtgccctggcccaccctggtgaccaccctgagctacggcgtgcagtgcttctcacgctaccccgatcacatgaagcagcacgacttcttcaagagcgccatgcctgagggctacatccaggagcgcaccatcttcttcgaggatgacggcaactacaagtcgcgcgccgaggtgaagttcgagggcgataccctggtgaatcgcatcgagctgaccggcaccgatttcaaggaggatggcaacatcctgggcaataagatggagtacaactacaacgcccacaatgtgtacatcatgaccgacaaggccaagaatggcatcaaggtgaacttcaagatccgccacaacatcgaggatggcagcgtgcagctggccgaccactaccagcagaatacccccatcggcgatggccctgtgctgctgcccgataaccactacctgtccacccagagcgccctgtccaaggaccccaacgagaagcgcgatcacatgatctacttcggcttcgtgaccgccgccgccatcacccacggcatggatgagctgtacaagtga

SEQ ID NO: 8534 - DNA, 1725 bp, Artificial Sequence
  source: /note="Description of Artificial Sequence: Synthetic polynucleotide"
atggaagaaacaagagagctacagtcgttagcggctgctgtgatgccatctgcccagacccttaaaattactgactttagcttcagtgactttgagctgtctgatctggaaacagcactgtgtacaattcggatgtttactgacctcaaccttgtgcagaacttccagatgaaacatgaggttctttgcagatggattttaagtgttaagaagaattatcggaagaatgttgcctatcataattggagacatgcctttaatacagctcagtgcatgtttgctgctctaaaagcaggcaaaattcagaacaagctgactgacctggagatacttgcattgctgattgctgcactaagccacgatttggatcaccgtggtgtgaataactcttacatacagcgaagtgaacatccacttgcccagctttactgccattcaatcatggaacaccatcattttgaccagtgcctgatgattcttaatagtccaggcaatcagattctcagtggcctctccattgaagaatataagaccacgttgaaaataatcaagcaagctattttagctacagacctagcactgtacattaagaggcgaggagaattttttgaacttataagaaaaaatcaattcaatttggaagatcctcatcaaaaggagttgtttttggcaatgctgatgacagcttgtgatctttctgcaattacaaaaccctggcctattcaacaacggatagcagaacttgtagcaactgaattttttgatcaaggagacagagagagaaaagaactcaacatagaacccactaatctaatgaacagggagaagaaaaacaaaatcccaagtatgcaagttgggttcatagatgccatctgcttgcaactgtatgaggccctgacccacgtgtcagaggactgtttccctttgctagatggctgcagaaagaacaggcagaaatggcaggcccttgcagaacagcagggaggtagtggtggaggcagtggtggagtgagcaagggcgccgagctgttcaccggcatcgtgcccatcctgatcgagctgaatggcgatgtgaatggccacaagttcagcgtgagcggcgagggcgagggcgatgccacctacggcaagctgaccctgaagttcatctgcaccaccggcaagctgcctgtgccctggcccaccctggtgaccaccctgagctacggcgtgcagtgcttctcacgctaccccgatcacatgaagcagcacgacttcttcaagagcgccatgcctgagggctacatccaggagcgcaccatcttcttcgaggatgacggcaactacaagtcgcgcgccgaggtgaagttcgagggcgataccctggtgaatcgcatcgagctgaccggcaccgatttcaaggaggatggcaacatcctgggcaataagatggagtacaactacaacgcccacaatgtgtacatcatgaccgacaaggccaagaatggcatcaaggtgaacttcaagatccgccacaacatcgaggatggcagcgtgcagctggccgaccactaccagcagaatacccccatcggcgatggccctgtgctgctgcccgataaccactacctgtccacccagagcgccctgtccaaggaccccaacgagaagcgcgatcacatgatctacttcggcttcgtgaccgccgccgccatcacccacggcatggatgagctgtacaagtga

SEQ ID NO: 8535 - DNA, 1725 bp, Artificial Sequence
  source: /note="Description of Artificial Sequence: Synthetic polynucleotide"
atggaagaaacaagagagctacagtcgttagcggctgctgtggtgccatctgcccagacccgtaaaattactgactttagcttcagtgactttgagctgtctgatctggaaacagcactgtgtacaattcggatgtttactgacctcaaccttgtgcagaacttcgagatgaaacatgaggttctttgcagatggattttaagtgttaagaagaattatcggaagaatgttgcctatcataattggagacatgcctttaatacagctcagtgcatgtttgctgctctaaaagcaggcaaaattcagaacaagctgactgacctggagatacttgcattgctgattgctgcactaagccacgatttggatcaccgtggtgtgaataactcttacatacagcgaagtgaacatccacttgcccagctttactgccattcaatcatggaacaccatcattttgaccagtgcctgatgattcttaatagtccaggcaatcagattctcagtggcctctccattgaagaatataagaccacgttgaaaataatcaagcaagctattttagctacagacctagcactgtacattaagaggcgaggagaattttttgaacttataagaaaaaatcaattcaatttggaagatcctcatcaaaaggagttgtttttggcaatgctgatgacagcttgtgatctttctgcaattacaaaaccctggcctattcaacaacggatagcagaacttgtagcaactgaattttttgatcaaggagacagagagagaaaagaactcaacatagaacccactgatctaatgaacagggagaagaaaaacaaaatcccaagtatgcaagttgggttcatagataccatctgcttgcaactgtatgaggccctgacccacgtgtcagaggactgtttccctttgctagatggctgcagaaagaacaggcagaaatggcaggcccttgcagaacagcagggaggtagtggtggaggcagtggtggagtgagcaagggcgccgagctgttcaccggcatcgtgcccatcctgatcgagctgaatggcgatgtgaatggccacaagttcagcgtgagcggcgagggcgagggcgatgccacctacggcaagctgaccctgaagttcatctgcaccaccggcaagctgcctgtgccctggcccaccctggtgaccaccctgagctacggcgtgcagtgcttctcacgctaccccgatcacatgaagcagcacgacttcttcaagagcgccatgcctgagggctacatccaggagcgcaccatcttcttcgaggatgacggcaactacaagtcgcgcgccgaggtgaagttcgagggcgataccctggtgaatcgcatcgagctgaccggcaccgatttcaaggaggatggcaacatcctgggcaataagatggagtacaactacaacgcccacaatgtgtacatcatgaccgacaaggccaagaatggcatcaaggtgaacttcaagatccgccacaacatcgaggatggcagcgtgcagctggccgaccactaccagcagaatacccccatcggcgatggccctgtgctgctgcccgataaccactacctgtccacccagagcgccctgtccaaggaccccaacgagaagcgcgatcacatgatctacttcggcttcgtgaccgccgccgccatcacccacggcatggatgagctgtacaagtga

SEQ ID NO: 8536 - DNA, 1725 bp, Artificial Sequence
  source: /note="Description of Artificial Sequence: Synthetic polynucleotide"
atggaagaaacaagagagctacagtcgttagcggctgctgtggtgccatctgcccagacccttaaaattactgactttagcttcagtgactttgagctgtctgatctggaaatagcactgtgtacaattcggatgtttactgacctcaaccttgtgcagaacttccagatgaaacatgaggttctttgcagatggattttaagtgttaagaggaattatcggaagaatgttgcctatcataattggagacatgcctttaatacagctcagtgcatgtttgctgctctaaaagcaggcaaaattcagaacaaactgactgacctggagatacttgcattgctgattgctgcactaagccacgatttggatcaccgtggtgtgaataactcttacatacagcgaagtgaacatccacttgcccagctttactgccattcaatcatggaacaccatcattttgaccagtgcctgatgattcttaatagtccaggcaatcagattctcagtggcctctccaatgaagaatataagaccacgttgaaaataatcaagcaagctattttagctacagacctagcactgtacattaagaggcgaggagaattttttgaacttataagaaaaaatcaattcaatttggaagatcctcatcaaaaggagttgtttttggcaatgctgatgacagcttgtgatctttctgcaattacaaaaccctggcctattcaacaacggatagcagaacttgtagcaactgaattttttgatcaaggagacagagagagaagagaactcaacatagaacccactgatctaatgaacagggagaagaaaaacaaaatcccaagtatgcaagttgggttcatagatgccatctgcttgcaactgtatgaggccctgacccacgtgtcagaggactgtttccctttgctagatggctgcagaaagaacaggcagaaatggcaggcccttgcagaacagcagggaggtagtggtggaggcagtggtggagtgagcaagggcgccgagctgttcaccggcatcgtgcccatcctgatcgagctgaatggcgatgtgaatggccacaagttcagcgtgagcggcgagggcgagggcgatgccacctacggcaagctgaccctgaagttcatctgcaccaccggcaagctgcctgtgccctggcccaccctggtgaccaccctgagctacggcgtgcagtgcttctcacgctaccccgatcacatgaagcagcacgacttcttcaagagcgccatgcctgagggctacatccaggagcgcaccatcttcttcgaggatgacggcaactacaagtcgcgcgccgaggtgaagttcgagggcgataccctggtgaatcgcatcgagctgaccggcaccgatttcaaggaggatggcaacatcctgggcaataagatggagtacaactacaacgcccacaatgtgtacatcatgaccgacaaggccaagaatggcatcaaggtgaacttcaagatccgccacaacatcgaggatggcagcgtgcagctggccgaccactaccagcagaatacccccatcggcgatggccctgtgctgctgcccgataaccactacctgtccacccagagcgccctgtccaaggaccccaacgagaagcgcgatcacatgatctacttcggcttcgtgaccgccgccgccatcacccacggcatggatgagctgtacaagtga

SEQ ID NO: 8537 - DNA, 1725 bp, Artificial Sequence
  source: /note="Description of Artificial Sequence: Synthetic polynucleotide"
atggaagaaacaagagagctacagtcgttagcggctgctgtggtgccatctgcccagacccttaaaattactgactttagcttcagtgactttgagctgtctgatctggaaacagcactgtgtacaattcggatgtttactgacctcaaccttgtgcagaacttccagatgaaacatgaggttctttgcagatggattttaagtgttaagaagaattatcggaagaatgttgcctatcataattggagacatgcctttaatacagctcagtgcatgtttgctgctctaaaagcaggcaaaattcagaacaagctgactgacctggagatacttgcattgctgattgctgcactaagccacgatttggatcaccgtgctgtgaataactcttacatacagcgaagtgaacatccacttgcccagctttactgccattcaatcatggaacaccatcattttgaccagtgcctgatgattcttaatagtccaggcaatcagattctcagtggcctctccattgaagaatataagaccacgttgaaaataatcaagcaagctattttagctacagacctagcactgtacattaagaggcgaggagaattttttgaacttataagaaaaaatcaattcaatttggaagatcctcatcaaaaggagttgtttttggcaatgctgatgacagcttgtgatctttctgcaattacaaaaccctggcctattcaacaacggatagcagaacttgtagcaattgaattttttgatcaaggagacagagagagaaaagaactcaacatagaacccactgatctaatgaacagggagaagaaaaacaaaatcccaagtatgcaagttgggttcatagatgccatctgcttgcaactgtatgaggccctgacccacgtgtcagaggactgtttccctttgctagatggctgcagaaagaacaggcagaaatggcaggcccttgcagaacagcagggaggtagtggtggaggcagtggtggagtgagcaagggcgccgagctgttcaccggcatcgtgcccatcctgatcgagctgaatggcgatgtgaatggccacaagttcagcgtgagcggcgagggcgagggcgatgccacctacggcaagctgaccctgaagttcatctgcaccaccggcaagctgcctgtgccctggcccaccctggtgaccaccctgagctacggcgtgcagtgcttctcacgctaccccgatcacatgaagcagcacgacttcttcaagagcgccatgcctgagggctacatccaggagcgcaccatcttcttcgaggatgacggcaactacaagtcgcgcgccgaggtgaagttcgagggcgataccctggtgaatcgcatcgagctgaccggcaccgatttcaaggaggatggcaacatcctgggcaataagatggagtacaactacaacgcccacaatgtgtacatcatgaccgacaaggccaagaatggcatcaaggtgaacttcaagatccgccacaacatcgaggatggcagcgtgcagctggccgaccactaccagcagaatacccccatcggcgatggccctgtgctgctgcccgataaccactacctgtccacccagagcgccctgtccaaggaccccaacgagaagcgcgatcacatgatctacttcggcttcgtgaccgccgccgccatcacccacggcatggatgagctgtacaagtga

SEQ ID NO: 8538 - DNA, 1725 bp, Artificial Sequence
  source: /note="Description of Artificial Sequence: Synthetic polynucleotide"
atggaagaaacaagagagctacagtcgttagcggctgctgtggtgccatctgcccagacccttaaaattactgactttagcttcagtgactttgagctgtctgatctggaaacagcactgtgtacaattcggatgtttactgacctcaaccttgtgcagaacttccagatgaaacatgaggttctttgcagatggattttaagtgttaagaagaattatcggaagaatgttgcctatcataattggagacatgcctttaatacagctcagtgcatgtttgctgctctaaaagcaggcaaaattcagaacaagctgactgacctggagatacttgcattgctgattgctgcactaagccacgatttggatcaccgtggtgtgaataactcttacatacatcgaagtgaacatccacttgcccagctttactgccattcaatcatggaacaccatcattttgaccagtgcctgatgattcttaatagtccaggcaatcagattctcagtggcctctccattgaagaatataagaccacgttgaaaataatcaagcaagctattttagctacagacctagcactgtacattaagaggcgaggagaattttttgaacttataagaaaaaatcaattcaatttggaagatcctcatcaaaaggagttgtttttggcaatgctgatgacagcttgtgatctttctgcaattacaaaaccctggcctattcaacaacggatagcagaacttgtagcaactgaattttttgatcaaggagacagagagagaaaagaactcaacatagaacccactgatctaatgaacagggagaagaaaaacaaaatcccaagtatgcaagttgggttcatagatgccatctgcttgcaactgtatgaggccctgacccacgtgtcagaggactgtttccctttgctagatggctgcagaaagaacaggcagaaatggcaggcccttgcagaacagcagggaggtagtggtggaggcagtggtggagtgagcaagggcgccgagctgttcaccggcatcgtgcccatcctgatcgagctgaatggcgatgtgaatggccacaagttcagcgtgagcggcgagggcgagggcgatgccacctacggcaagctgaccctgaagttcatctgcaccaccggcaagctgcctgtgccctggcccaccctggtgaccaccctgagctacggcgtgcagtgcttctcacgctaccccgatcacatgaagcagcacgacttcttcaagagcgccatgcctgagggctacatccaggagcgcaccatcttcttcgaggatgacggcaactacaagtcgcgcgccgaggtgaagttcgagggcgataccctggtgaatcgcatcgagctgaccggcaccgatttcaaggaggatggcaacatcctgggcaataagatggagtacaactacaacgcccacaatgtgtacatcatgaccgacaaggccaagaatggcatcaaggtgaacttcaagatccgccacaacatcgaggatggcagcgtgcagctggccgaccactaccagcagaatacccccatcggcgatggccctgtgctgctgcccgataaccactacctgtccacccagagcgccctgtccaaggaccccaacgagaagcgcgatcacatgatctacttcggcttcgtgaccgccgccgccatcacccacggcatggatgagctgtacaagtga

SEQ ID NO: 8539 - DNA, 1725 bp, Artificial Sequence
  source: /note="Description of Artificial Sequence: Synthetic polynucleotide"
atggaagaaacaagagagctacagtcgttagcggctgctgtggtgccatctgcccagacccttaaaattactgactttagcttcagtgactttgagctgtctgatctggaaacagcactgtgtacaattcggatgtttactgacctcaaccttgtgcagaacttccagatgaaacatgaggttctttgcagatggattttaagtgttaagaagaattatcggaagaatgttgcctatcataattggagacttgcctttaatacagctcagtgcatgtttgctgctctaaaagcaggcaaaattcagaacaagctgactgacctggagatacttgcattgctgattgctgcactaagccacgatttggatcaccgtggtgtgaataactcttacatacagcgaagtgaacatccacttgcccagctttactgccattcaatcatggaacaccatcattttgaccagtgcctgatgattcttaatagtccaggcaatcagattctcagtggcctctccattgaagaatataagaccacgttgaaaataatcaagcaagctattttagttacagacctagcactgtacattaagaggcgaggagaattttttgaacttataagaaaaaatcaattcaatttggaagatcctcatcaaaaggagttgtttttggcaatgctgatgacagcttgtgatctttctgcaattacaaaaccctggcctattcaacaacggatagcagaacttgtagcaactgaattttttgatcaaggagacagagagagaaaagaactcaacatagaacccactgatctaatgaacagggagaagaaaaacaaaatcccaagtatgcaagttgggttcatagatgccatctgcttgcaactgtatgaggccctgacccacgtgtcagaggactgtttccctttgctagatggctgcagaaagaacaggcagaaatggcaggcccttgcagaacagcagggaggtagtggtggaggcagtggtggagtgagcaagggcgccgagctgttcaccggcatcgtgcccatcctgatcgagctgaatggcgatgtgaatggccacaagttcagcgtgagcggcgagggcgagggcgatgccacctacggcaagctgaccctgaagttcatctgcaccaccggcaagctgcctgtgccctggcccaccctggtgaccaccctgagctacggcgtgcagtgcttctcacgctaccccgatcacatgaagcagcacgacttcttcaagagcgccatgcctgagggctacatccaggagcgcaccatcttcttcgaggatgacggcaactacaagtcgcgcgccgaggtgaagttcgagggcgataccctggtgaatcgcatcgagctgaccggcaccgatttcaaggaggatggcaacatcctgggcaataagatggagtacaactacaacgcccacaatgtgtacatcatgaccgacaaggccaagaatggcatcaaggtgaacttcaagatccgccacaacatcgaggatggcagcgtgcagctggccgaccactaccagcagaatacccccatcggcgatggccctgtgctgctgcccgataaccactacctgtccacccagagcgccctgtccaaggaccccaacgagaagcgcgatcacatgatctacttcggcttcgtgaccgccgccgccatcacccacggcatggatgagctgtacaagtga

SEQ ID NO: 8540 - DNA, 1725 bp, Artificial Sequence
  source: /note="Description of Artificial Sequence: Synthetic polynucleotide"
atggaagaaacaagagagctacagtcgttagcggctgctgtggtgccatctgcccagacccttaaaattactgactttagcttcagtgactttgagctgtctgatctggaaacagcactgtgtacaattcggatgtttactgacctcaaccttgtgcagaacttccagatgaaacatgaggttctttgcagatggattttaagtgttaagaagaattatcggaagtatgttgcctatcataattggagacatgcctttaatacagctcagtgcatgtttgctgctctaaaagcaggcaaaattcagaacaagctgactgacctggagatacttgcattgctgattgctgcactaagccacgatttggatcaccgtggtgtgaataactcttacatacagcgaagtgaacatccacttgcccagctttactgccattcaatcatggaacaccatcattttgaccagtgcctgatgattcttaatagtccaggcaatcagattctcagtggcctctccattgaagaatataagaccacgttgaaaataatcaagcaagctattttagctacagacctagcactgtacattaagaggcgaggagaattttttgaacttataagaaaaaatcaattcaatttggaagatcctcatcaaaaggagttgtttttggcaatgctgatgacagcttgtgatctttctgcaattacaaaaccctggcctattcaacaacggatagcagaacttgtagcaactgaattttttgatcaaggagacagagagagaaaagaactcaacttagaacccactgatctaatgaacagggagaagaaaaacaaaatcccaagtatgcaagttgggttcatagatgccatctgcttgcaactgtatgaggccctgacccacgtgtcagaggactgtttccctttgctagatggctgcagaaagaacaggcagaaatggcaggcccttgcagaacagcagggaggtagtggtggaggcagtggtggagtgagcaagggcgccgagctgttcaccggcatcgtgcccatcctgatcgagctgaatggcgatgtgaatggccacaagttcagcgtgagcggcgagggcgagggcgatgccacctacggcaagctgaccctgaagttcatctgcaccaccggcaagctgcctgtgccctggcccaccctggtgaccaccctgagctacggcgtgcagtgcttctcacgctaccccgatcacatgaagcagcacgacttcttcaagagcgccatgcctgagggctacatccaggagcgcaccatcttcttcgaggatgacggcaactacaagtcgcgcgccgaggtgaagttcgagggcgataccctggtgaatcgcatcgagctgaccggcaccgatttcaaggaggatggcaacatcctgggcaataagatggagtacaactacaacgcccacaatgtgtacatcatgaccgacaaggccaagaatggcatcaaggtgaacttcaagatccgccacaacatcgaggatggcagcgtgcagctggccgaccactaccagcagaatacccccatcggcgatggccctgtgctgctgcccgataaccactacctgtccacccagagcgccctgtccaaggaccccaacgagaagcgcgatcacatgatctacttcggcttcgtgaccgccgccgccatcacccacggcatggatgagctgtacaagtga

SEQ ID NO: 8541 - DNA, 1725 bp, Artificial Sequence
  source: /note="Description of Artificial Sequence: Synthetic polynucleotide"
atggaagaaacaagagagctacagtcgttagcggctgctgtggtgccatctgcccagacccttaaaattactgactttagcttaagtgactttgagctgtctgatctggaaacagcactgtgtacaattcggatgtttactgacctcaaccttgtgcagaacttccagatgaaacatgaggttctttgcagatggattttaagtgttaagaagaattatcggaagaatgttgcctatcataattggagacatgcctttaatacagctcagtgcatgtttgctgctctaaaagcaggcaaaattcagaacaagctgactgacctggagatacttgcattgctgattgctgcactaagccacgatttggatcaccgtgctgtgaataactcttacatacagcgaagtgaacatccacttgcccagctttactgccattcaatcatggaacaccatcattttgaccagtgcctgatgattcttaatagtccaggcaatcagattctcagtggcctctccattgaagaatataagaccacgttgaaaataatcaagcaagctattttagctacagacctagcactgtacattaagaggcgaggagaattttttgaacttataagaaaaaatcaattcaatttggaagatcctcatcaaaaggagttgtttttggcaatgctgatgacagcttgtgatctttctgcaattacaaaaccctggcctattcaacaacggatagcagaacttgtagcaattgaattttttgatcaaggagacagagagagaaaagaactcaacatagaacccactgatctaatgaacagggagaagaaaaacaaaatcccaagtatgcaagttgggttcatagatgccatctgcttgcaactgtatgaggccctgacccacgtgtcagaggactgtttccctttgctagatggctgcagaaagaacaggcagaaatggcaggcccttgcagaacagcagggaggtagtggtggaggcagtggtggagtgagcaagggcgccgagctgttcaccggcatcgtgcccatcctgatcgagctgaatggcgatgtgaatggccacaagttcagcgtgagcggcgagggcgagggcgatgccacctacggcaagctgaccctgaagttcatctgcaccaccggcaagctgcctgtgccctggcccaccctggtgaccaccctgagctacggcgtgcagtgcttctcacgctaccccgatcacatgaagcagcacgacttcttcaagagcgccatgcctgagggctacatccaggagcgcaccatcttcttcgaggatgacggcaactacaagtcgcgcgccgaggtgaagttcgagggcgataccctggtgaatcgcatcgagctgaccggcaccgatttcaaggaggatggcaacatcctgggcaataagatggagtacaactacaacgcccacaatgtgtacatcatgaccgacaaggccaagaatggcatcaaggtgaacttcaagatccgccacaacatcgaggatggcagcgtgcagctggccgaccactaccagcagaatacccccatcggcgatggccctgtgctgctgcccgataaccactacctgtccacccagagcgccctgtccaaggaccccaacgagaagcgcgatcacatgatctacttcggcttcgtgaccgccgccgccatcacccacggcatggatgagctgtacaagtga

SEQ ID NO: 8542 - DNA, 1725 bp, Artificial Sequence
  source: /note="Description of Artificial Sequence: Synthetic polynucleotide"
atggaagaaacaagagagctacagtcgttagcggctgctgtggtgccatctgcccagacccttaaaattactgactttagcttcagtgactttgagctgtctgatctggaaacagcactgtgtacaattcggatgtttactgacctcaaccttgtgcagaacttccagatgaaacatgaggttctttgcagatggattttaagtgttaagaagaattatcggaagaatgttgcctatcataattggagacatgcctttaatacagctcagtgcatgtttgctgctctaaaagcaggcaaaattcagaacaagctgactgacctggagatacttgcattgctgattgctgcactaagccacgatttggatcaccgtggtgtgaataactcttacatacagcgaagtgaacatccacttgcccagctttactgccattcaatcatggaacaccatcattttgaccagtgcctgatgattcttaatagtccaggcaatcagattctcagtggcctctccattgaagaatataagaccacgttgaaaataatcaagcaagctattttagctacagacctagcactgtacattaagaggcgaggagaattttttgaacttataagaaaaaatcaattcaatttggaagatcctcatcaaaaggagttgtttttggcaatgctgatgacagcttgtgatctttctgcaattacaaaaccctggcctattcaacaacggatagcagaacttgtagcaactgaattttttgatcaaggagacagagagagaaacgaactcaacatagaacccactgatctaatgaacagggagaagaaaaacaaaatcccaagtatgcaagttgggttcatagatgccatctgcttgcaactgtatgaggccctgacccacgtgtcagaggactgtttccctttgctagatggctgcagaaagaacaggcagaaatggcaggcccttgcagaacagcagggaggtagtggtggaggcagtggtggagtgagcaagggcgccgagctgttcaccggcatcgtgcccatcctgatcgagctgaatggcgatgtgaatggccacaagttcagcgtgagcggcgagggcgagggcgatgccacctacggcaagctgaccctgaagttcatctgcaccaccggcaagctgcctgtgccctggcccaccctggtgaccaccctgagctacggcgtgcagtgcttctcacgctaccccgatcacatgaagcagcacgacttcttcaagagcgccatgcctgagggctacatccaggagcgcaccatcttcttcgaggatgacggcaactacaagtcgcgcgccgaggtgaagttcgagggcgataccctggtgaatcgcatcgagctgaccggcaccgatttcaaggaggatggcaacatcctgggcaataagatggagtacaactacaacgcccacaatgtgtacatcatgaccgacaaggccaagaatggcatcaaggtgaacttcaagatccgccacaacatcgaggatggcagcgtgcagctggccgaccactaccagcagaatacccccatcggcgatggccctgtgctgctgcccgataaccactacctgtccacccagagcgccctgtccaaggaccccaacgagaagcgcgatcacatgatctacttcggcttcgtgaccgccgccgccatcacccacggcatggatgagctgtacaagtga

SEQ ID NO: 8543 - DNA, 1725 bp, Artificial Sequence
  source: /note="Description of Artificial Sequence: Synthetic polynucleotide"
atggaagaaacaagagagctacagtcgttagcggctgctgtggtgccatctgcccagacccttaaaattactgactttagcttcagtgactttgagctgtctgatctggaaacagcactgtgtacaattcggatgtttactgacctcaaccttgtgcagaacttccagatgaaacatgaggttctttgcagatggattttaagtgttaagaagaattatcggaagaatgttgcctatcataattggagacatgcctttaatacagctcagtgcatgtttgctgctctaaaagcaggcaaaattcagaacaagctgactgacctggagatacttgcattgctgattgctgcactaagccacgatttggatcaccgtggtgtgaataactcttacatacagcgaagtgaacatccacttgcccagctttactgccattcaatcatggaacaccatcattttgaccagtgcctgatgattcttaatagtccaggcaatcagattctcagtggcctctccattgaagaatataagaccacgttgaaaataatcaagcaagctattttagctacagacctagcactgtacattaagaggcgaggagaattttttgaacttataagaaaaaatcaattcaatttggaagatcctcatcaaaaggagttgtttttggcaatgctgatgacagcttgtgatctttctgcaattacacaaccctggcctattcaacaacggatagcagaacttgtagcaactgaattttttgatcaaggagacagagagagaaaagaactcaacatagaacccactgatctaatgaacagggagaagaaaaacaaaatcccaagtatgcaagttgggttcatagatgccatctgcttgcaactgtatgaggccctgacccacgtgtcagaggactgtttccctttgctagatggctgcagaaataacaggcagaaatggcaggcccttgcagaacagcagggaggtagtggtggaggcagtggtggagtgagcaagggcgccgagctgttcaccggcatcgtgcccatcctgatcgagctgaatggcgatgtgaatggccacaagttcagcgtgagcggcgagggcgagggcgatgccacctacggcaagctgaccctgaagttcatctgcaccaccggcaagctgcctgtgccctggcccaccctggtgaccaccctgagctacggcgtgcagtgcttctcacgctaccccgatcacatgaagcagcacgacttcttcaagagcgccatgcctgagggctacatccaggagcgcaccatcttcttcgaggatgacggcaactacaagtcgcgcgccgaggtgaagttcgagggcgataccctggtgaatcgcatcgagctgaccggcaccgatttcaaggaggatggcaacatcctgggcaataagatggagtacaactacaacgcccacaatgtgtacatcatgaccgacaaggccaagaatggcatcaaggtgaacttcaagatccgccacaacatcgaggatggcagcgtgcagctggccgaccactaccagcagaatacccccatcggcgatggccctgtgctgctgcccgataaccactacctgtccacccagagcgccctgtccaaggaccccaacgagaagcgcgatcacatgatctacttcggcttcgtgaccgccgccgccatcacccacggcatggatgagctgtacaagtga

SEQ ID NO: 8544 - DNA, 1725 bp, Artificial Sequence
  source: /note="Description of Artificial Sequence: Synthetic polynucleotide"
atggaagaaacaagagagctacagtcgttagcggctgctgtggtgccatctgcccagacccttaaaattactgactttagcttcagtgactttgagctgtctgatctggaaacagcactgtgtacaattcggatgtttactgacctcaaccttgtgcagaacttccagatgaaacatgaggttctttgcagatggattttaagtgttaagaaggattatcggaagaatgttgcctatcataattggagacatgcctttaatacagctcagtgcatgtttgctgctctaaaagcaggcaaaattcagaacaagctgactgacctggagatacttgcattgctgattgctgcactaagccacgatttggatcaccgtggtgtgaataactcttacatacagcgaagtgaacatccacttgcccagctttactgccattcaatcatggaacaccatcattttgaccagtgcctgatgattcttaatagtccaggcaatcagattctcagtggcctctccattgaagaatataagaccacgttgaaaataatcaagcaagctattttagctacagacctagcactgtacattaagaggcgaggagaattttttgaacttataagaaaaaatcaattcaatttggaagatcctcatcaaaaggagttgtttttggcaatgctgatgacagcttgtgatctttctgcaattacaaaaccctggcctattcaacaacggatagcagaacttgtagcaactgaattttttgatcaaggagacagagagagaaaagaactcaacatagaacccactgatctaatgaacagggagaagaaaaacaaaatcccaagtatgcaagttgggttcatagatgccatctgcttgcaactgtatgaggccctgacccacgtgtcagaggactgtttccctttgctagatggctgcagaaagaacaggcagaaatggcaggcccttgcagaacagcagggaggtagtggtggaggcagtggtggagtgagcaagggcgccgagctgttcaccggcatcgtgcccatcctgatcgagctgaatggcgatgtgaatggccacaagttcagcgtgagcggcgagggcgagggcgatgccacctacggcaagctgaccctgaagttcatctgcaccaccggcaagctgcctgtgccctggcccaccctggtgaccaccctgagctacggcgtgcagtgcttctcacgctaccccgatcacatgaagcagcacgacttcttcaagagcgccatgcctgagggctacatccaggagcgcaccatcttcttcgaggatgacggcaactacaagtcgcgcgccgaggtgaagttcgagggcgataccctggtgaatcgcatcgagctgaccggcaccgatttcaaggaggatggcaacatcctgggcaataagatggagtacaactacaacgcccacaatgtgtacatcatgaccgacaaggccaagaatggcatcaaggtgaacttcaagatccgccacaacatcgaggatggcagcgtgcagctggccgaccactaccagcagaatacccccatcggcgatggccctgtgctgctgcccgataaccactacctgtccacccagagcgccctgtccaaggaccccaacgagaagcgcgatcacatgatctacttcggcttcgtgaccgccgccgccatcacccacggcatggatgagctgtacaagtga

SEQ ID NO: 8545 - DNA, 1725 bp, Artificial Sequence
  source: /note="Description of Artificial Sequence: Synthetic polynucleotide"
atggaagaaacaagagagctacagtcgttagcggctgctgtggtgccatctgcccagacccttaaaattactgactttagcttcagtgactttgagctgtctgatctggaaacagcactgtgtacaattcggatgtttactgacctcaaccttgtgcagaacttccagatgaaacatgaggttctttgcagatggattttaagtgttaagaagaattatcggaagaatgttgcctatcataattggagacatgcctttaatacagctcagtgcatgtttgctgctctaaaagcaggcaaaattcagaacaagctgactgacctggagatacttgcattgctgattgctgcactaagccacgatttggatcaccgtggtgtgaataactcttacatacagcgaagtgaacatccacttgcccagctttactgccattcaagcatggaacaccaccattttgaccagtgcctgatgattcttaatagtccaggcaatcagattctcagtggcctctccattgaagaatataagaccacgttgaaaataatcaagcaagctattttagctacagacctagcactgtacattaagaggcgaggagaattttttgaacttataagaaaaaatcaattcaatttggaagatcctcatcaaaaggagttgtttttggcaatgctgatgacagcttgtgatctttctgcaattacaaaaccctggcctattcaacaacggatagcagaacttgtagcaactgaattttttgatcaaggagacagagagagaaaagaactcaacatagaacccactgatctaatgaacagggagaagaaaaacaaaatcccaagtatgcaagttgggttcatagatgccatctgcttgcaactgtatgaggccctgacccacgtgtcagaggactgtttccctttgctagatggctgcagaaagaacaggcagaaatggcaggcccttgcagaacagcagggaggtagtggtggaggcagtggtggagtgagcaagggcgccgagctgttcaccggcatcgtgcccatcctgatcgagctgaatggcgatgtgaatggccacaagttcagcgtgagcggcgagggcgagggcgatgccacctacggcaagctgaccctgaagttcatctgcaccaccggcaagctgcctgtgccctggcccaccctggtgaccaccctgagctacggcgtgcagtgcttctcacgctaccccgatcacatgaagcagcacgacttcttcaagagcgccatgcctgagggctacatccaggagcgcaccatcttcttcgaggatgacggcaactacaagtcgcgcgccgaggtgaagttcgagggcgataccctggtgaatcgcatcgagctgaccggcaccgatttcaaggaggatggcaacatcctgggcaataagatggagtacaactacaacgcccacaatgtgtacatcatgaccgacaaggccaagaatggcatcaaggtgaacttcaagatccgccacaacatcgaggatggcagcgtgcagctggccgaccactaccagcagaatacccccatcggcgatggccctgtgctgctgcccgataaccactacctgtccacccagagcgccctgtccaaggaccccaacgagaagcgcgatcacatgatctacttcggcttcgtgaccgccgccgccatcacccacggcatggatgagctgtacaagtga

SEQ ID NO: 8546 - DNA, 1725 bp, Artificial Sequence
  source: /note="Description of Artificial Sequence: Synthetic polynucleotide"
atggaagaaacaagagagctacagtcgttagcggctgctgtgatgccatctgcccagacccttaaaattactgactttagcttcagtgactttgagctgtctgatctggaaacagcactgtgtacaattcggatgtttactgacctcaaccttgtgcagaacttccagatgaaacatgaggttctttgcagatggattttaagtgttaagaagaattatcggaagaatgttgcctatcataattggagacatgcctttaatacagctcagtgcatgtttgctgctctaaaagcaggcaaaattcagaacaagctgactgacctggagatacttgcattgctgattgctgcactaagccacgatttggatcaccgtggtgtgaataactcttacatacagcgaagtgaacatccacttgcccagctttactgccattcaatcatggaacaccatcattttgaccagtgcctgatgattcttaatagtccaggcaatcagattctcagtggcctctccattgaagaatataagaccacgttgaaaataatcaagcaagctattttagctacagacctagcactgtacattaagaggcgaggagaattttttgaacttataagaaaaaatcaattcaatttggaagatcctcatcaaaaggagttgtttttggcaatgctgatgacagcttgtgatctttctgcaattacaaaaccctggcctattcaacaacggatagcagaacttgtagcaactgaattttttgatcaaggagacagagagagaaaagaactcaacatagaacccactgatctaatgaacagggagaagaaaaacaaaatcccaagtatgcaagttgggatcatagatgccatctgcttgcaactgtatgaggccctgacccacgtgtcagaggactgtttccctttgctagatggctgcagaaagaacaggcagaaatggcaggcccttgcagaacagcagggaggtagtggtggaggcagtggtggagtgagcaagggcgccgagctgttcaccggcatcgtgcccatcctgatcgagctgaatggcgatgtgaatggccacaagttcagcgtgagcggcgagggcgagggcgatgccacctacggcaagctgaccctgaagttcatctgcaccaccggcaagctgcctgtgccctggcccaccctggtgaccaccctgagctacggcgtgcagtgcttctcacgctaccccgatcacatgaagcagcacgacttcttcaagagcgccatgcctgagggctacatccaggagcgcaccatcttcttcgaggatgacggcaactacaagtcgcgcgccgaggtgaagttcgagggcgataccctggtgaatcgcatcgagctgaccggcaccgatttcaaggaggatggcaacatcctgggcaataagatggagtacaactacaacgcccacaatgtgtacatcatgaccgacaaggccaagaatggcatcaaggtgaacttcaagatccgccacaacatcgaggatggcagcgtgcagctggccgaccactaccagcagaatacccccatcggcgatggccctgtgctgctgcccgataaccactacctgtccacccagagcgccctgtccaaggaccccaacgagaagcgcgatcacatgatctacttcggcttcgtgaccgccgccgccatcacccacggcatggatgagctgtacaagtga

SEQ ID NO: 8547 - DNA, 1725 bp, Artificial Sequence
  source: /note="Description of Artificial Sequence: Synthetic polynucleotide"
atggaagaaacaagagagctacagtcgttagcggctgctgtggtgccatctgcccagacccttaaaattactgactttagcttcagtgactttgagctgtctgatctggaaacagcactgtgtacaattcggatgtttactgacctcaaccttgtgcagaacttccagatgaaacatgaggttctttgcagatggattttaagtgttaagaagaattatcggaagaatgttgcctatcataattggagacatgcctttaatacagctcagtgcatgtttgctgctctaaaagcaggcaaaattcagaacaagctgactgacctggagatacttgcattgctgattgctgcactaagccacgatttggatcaccgtggtgtgaataactcttacatacagcgaagtgaacatccacttgcccagctttactgccattcaatcatggaacaccatcattttgaccagtgcctgatgattcttaatagtccaggcaatcagattctcagtggcctctccattgaagaatataagaccacgttgaaaataatcaagcaagctattttagctacagacctagcactgtacattaagaggcgaggagaattttttgaacttataagaaaaaatcaattcaatttggaagatcctcatcaaaaggagttgtttttggcaatgctgatgacagcttgtgatctttctgcaattacaaaaccctggcctattcaacaacggatagcagaacttgtagcaactgaattttttgatcaaggagacagagagagaaaagaactcaacttagaacccactgatctaatgaacagggagaagaaaaacaaaatcccaagtatgcaagttgggttcatagatgccatctgcttgcaactgtatgaggccctgacccacgtgtcagaggactgtttccctttgctagatggctgcagaaagaacaggcagaaatggcaggcccttgcagaacagcagggaggtagtggtggaggcagtggtggagtgagcaagggcgccgagctgttcaccggcatcgtgcccatcctgatcgagctgaatggcgatgtgaatggccacaagttcagcgtgagcggcgagggcgagggcgatgccacctacggcaagctgaccctgaagttcatctgcaccaccggcaagctgcctgtgccctggcccaccctggtgaccaccctgagctacggcgtgcagtgcttctcacgctaccccgatcacatgaagcagcacgacttcttcaagagcgccatgcctgagggctacatccaggagcgcaccatcttcttcgaggatgacggcaactacaagtcgcgcgccgaggtgaagttcgagggcgataccctggtgaatcgcatcgagctgaccggcaccgatttcaaggaggatggcaacatcctgggcaataagatggagtacaactacaacgcccacaatgtgtacatcatgaccgacaaggccaagaatggcatcaaggtgaacttcaagatccgccacaacatcgaggatggcagcgtgcagctggccgaccactaccagcagaatacccccatcggcgatggccctgtgctgctgcccgataaccactacctgtccacccagagcgccctgtccaaggaccccaacgagaagcgcgatcacatgatctacttcggcttcgtgaccgccgccgccatcacccacggcatggatgagctgtacaagtga

SEQ ID NO: 8548 - DNA, 1725 bp, Artificial Sequence
  source: /note="Description of Artificial Sequence: Synthetic polynucleotide"
atggaagaaacaagagagctacagtcgttagcggctgctgtggtgccatctgcccagacccttaaaattactgactttagcttcagtgactttgagctgtctgatctggaaacagcactgtgtacaattcggatgtttactgacctcaaccttgtgcagaacttccagatgaaacatgaggttctttgcagatggattttaagtgttaagaagaattatcagaagaatgttgcctatcataattggagacatgcctttaatacagctcagtgcatgtttgctgctctaaaagcaggcaaaattcagaacaagctgactgacctggagatacttgcattgctgattgctgcactaagccacgatttggatcaccgtggtgtgaataactcttacatacagcgaagtgaacatccacttgcccagctttactgccattcaatcatggaacaccatcattttgaccagtgcctgatgattcttaatagtccaggcaatcagattctcagtggcctctccattgaagaatataagaccacgttgaaaataatcaagcaagctattttagctacagacctagcactgtacattaagaggcgaggagaattttttgaacttataagaaaaaatcaattcaatttggaagatcctcatcaaaaggagttgtttttggcaatgctgatgacagcttgtgatctttctgcaattacaaaaccctggcctattcaacaacggatagcagaacttgtagcaactgaattttttgatcaaggagacagagagagaaaagaactcaacatagaacccactgatctaatgaacagggagaagaaaaacaaaatcccaagtatgcaagttgggttcatagatgccatctgcttgcaactgtatgaggccctgacccacgtgtcagaggactgtttccctttgctagatggctgcagaaagaacaggcagaaatggcaggcccttgcagaacagcagggaggtagtggtggaggcagtggtggagtgagcaagggcgccgagctgttcaccggcatcgtgcccatcctgatcgagctgaatggcgatgtgaatggccacaagttcagcgtgagcggcgagggcgagggcgatgccacctacggcaagctgaccctgaagttcatctgcaccaccggcaagctgcctgtgccctggcccaccctggtgaccaccctgagctacggcgtgcagtgcttctcacgctaccccgatcacatgaagcagcacgacttcttcaagagcgccatgcctgagggctacatccaggagcgcaccatcttcttcgaggatgacggcaactacaagtcgcgcgccgaggtgaagttcgagggcgataccctggtgaatcgcatcgagctgaccggcaccgatttcaaggaggatggcaacatcctgggcaataagatggagtacaactacaacgcccacaatgtgtacatcatgaccgacaaggccaagaatggcatcaaggtgaacttcaagatccgccacaacatcgaggatggcagcgtgcagctggccgaccactaccagcagaatacccccatcggcgatggccctgtgctgctgcccgataaccactacctgtccacccagagcgccctgtccaaggaccccaacgagaagcgcgatcacatgatctacttcggcttcgtgaccgccgccgccatcacccacggcatggatgagctgtacaagtga

SEQ ID NO: 8549 - DNA, 1725 bp, Artificial Sequence
  source: /note="Description of Artificial Sequence: Synthetic polynucleotide"
atggaagaaacaagagagctacagtcgttagcggctgctgtggtgccatttgcccagacccgtaaaattactgactttagcttcagtgactttgagctgtctgatctggaaacagcactgtgtacaattcggatgtttactgacctcaaccttgtgcagaacttccagatgaaacatgaggttctttgcagatggattttaagtgttaagaagaattatcggaagaatgttgcctatcataattggagacatgcctttaatacagctcagtgcatgtttgctgctctaaaagcaggcaaaattcagaacaagctgactgacctggagatacttgcattgctgattgctgcactaagccacgatttggatcaccgtggtgtgaataactcttacatacagcgaagtgaacatccacttgcccagctttactgccattcaatcatggaacaccatcattttgaccagtgcctgatgattcttaatagtccaggcaatcagattctcagtggcctctccattgaagaatataagaccacgttgaaaataatcaagcaagctattttagctacagacctagcactgtacattaagaggcgaggagaattttttgaacttataagaaaaaatcaattcaatttggaagatcctcatcaaaaggagttgtttttggcaatgctgatgacagcttgtgatctttctgcaattacaaaaccctggcctattcaacaacggatagcagaacttgtagcaactgaattttttgatcaaggagacagagagagaaaagaactcaacatagaacccactgatctaatgaacagggagaagaaaaacaaaatcccaagtatgcaagttgggttcatagatgccatctgcttgcaactgtatgaggccctgacccacgtgtcagaggactgtttccctttgctagatggctgcagaaagaacaggcagaaatggcaggcccttgcagaacagcagggaggtagtggtggaggcagtggtggagtgagcaagggcgccgagctgttcaccggcatcgtgcccatcctgatcgagctgaatggcgatgtgaatggccacaagttcagcgtgagcggcgagggcgagggcgatgccacctacggcaagctgaccctgaagttcatctgcaccaccggcaagctgcctgtgccctggcccaccctggtgaccaccctgagctacggcgtgcagtgcttctcacgctaccccgatcacatgaagcagcacgacttcttcaagagcgccatgcctgagggctacatccaggagcgcaccatcttcttcgaggatgacggcaactacaagtcgcgcgccgaggtgaagttcgagggcgataccctggtgaatcgcatcgagctgaccggcaccgatttcaaggaggatggcaacatcctgggcaataagatggagtacaactacaacgcccacaatgtgtacatcatgaccgacaaggccaagaatggcatcaaggtgaacttcaagatccgccacaacatcgaggatggcagcgtgcagctggccgaccactaccagcagaatacccccatcggcgatggccctgtgctgctgcccgataaccactacctgtccacccagagcgccctgtccaaggaccccaacgagaagcgcgatcacatgatctacttcggcttcgtgaccgccgccgccatcacccacggcatggatgagctgtacaagtga

SEQ ID NO: 8550 - DNA, 1725 bp, Artificial Sequence
  source: /note="Description of Artificial Sequence: Synthetic polynucleotide"
atggaagaaacaagagagctacagtcgttagcggctgctgtggtgtcatctgcccagacccttaaaattactgactttagcttcagtgacattgagctgtctgatctggagacagcactgtgtacaattcggatgtttactgacctcaaccttgtgcagaacttccagatgaaacatgaggttctttgcagatggattttaagtgttaagaagaattatcggaagaatgttgcctatcataattggagacatgcctttaatacagctcagtgcatgtttgctgctctaaaagcaggcaaaattcagaacaagctgactgacctggagatacttgcattgctgattgctgcactaagccacgatttggatcaccatggtgtgaataactcttacatacagcgaagtgaacatccacttgcccagctttactgccattcaatcatggaacaccatcattttgaccagtgcctgatgattcttaatagtccaggcaatcagattctcagtggcctctccattgaagaatataagaccacgttgaaaataatcaagcaagctattttagctacagacctagcactgtacattaagaggcgaggagaattttttgaacttataagaaaaaatcaattcaatttggaagatcctcatcaaaaggagttgtttttggcaatgctgatgacagcttgtgatctttctgcaattacaaaaccctggcctattcaacaacggataacagaacttgtagcaactgaattttttgatcaaggagacagagagagaaaagaactcaacatagaacccactgatctaatgaacagggagaagaaaaacaaaatcccaagtatgcaagttgggttcatagatgccatctgcttgcaactgtatgaggccctgacccacgtgtcagaggactgtttccctttgctagatggctgcggaaagaacaggcagaaatggcaggcccttgcagaacagcagggaggtagtggtggaggcagtggtggagtgagcaagggcgccgagctgttcaccggcatcgtgcccatcctgatcgagctgaatggcgatgtgaatggccacaagttcagcgtgagcggcgagggcgagggcgatgccacctacggcaagctgaccctgaagttcatctgcaccaccggcaagctgcctgtgccctggcccaccctggtgaccaccctgagctacggcgtgcagtgcttctcacgctaccccgatcacatgaagcagcacgacttcttcaagagcgccatgcctgagggctacatccaggagcgcaccatcttcttcgaggatgacggcaactacaagtcgcgcgccgaggtgaagttcgagggcgataccctggtgaatcgcatcgagctgaccggcaccgatttcaaggaggatggcaacatcctgggcaataagatggagtacaactacaacgcccacaatgtgtacatcatgaccgacaaggccaagaatggcatcaaggtgaacttcaagatccgccacaacatcgaggatggcagcgtgcagctggccgaccactaccagcagaatacccccatcggcgatggccctgtgctgctgcccgataaccactacctgtccacccagagcgccctgtccaaggaccccaacgagaagcgcgatcacatgatctacttcggcttcgtgaccgccgccgccatcacccacggcatggatgagctgtacaagtga

SEQ ID NO: 8551 - DNA, 978 bp, Artificial Sequence
  source: /note="Description of Artificial Sequence: Synthetic Destabilizing Domain (DD)"
gaagaaacaagagagctacagtcgttagcggctgctgtggtgccatctgcccagacccttaaaattactgactttagcttcagtgactttgagctgtctgatctggaaacagcactgtgtacaattcggatgtttactgacctcaaccttgtgcagaacttccagatgaaacatgaggttctttgcagatggattttaagtgttaagaagaattatcggaagaatgttgcctatcataattggagacatgcctttaatacagctcagtgcatgtttgctgctctaaaagcaggcaaaattcagaacaagctgactgacctggagatacttgcattgctgattgctgcactaagccacgatttggatcaccgtggtgtgaataactcttacatacagcgaagtgaacatccacttgcccagctttactgccattcaatcatggaacaccatcattttgaccagtgcctgatgattcttaatagtccaggcaatcagattctcagtggcctctccattgaagaatataagaccacgttgaaaataatcaagcaagctattttagctacagacctagcactgtacattaagaggataggagaattttttgaacttataagaaaaaatcaattcaatttggaagatcctcatcaaaaggagttgtttttggcaatgctgatgacagcttgtgatctttctgcaattacaaaaccctggcctattcaacaacggatagcagaacttgtagcaactgaattttttgatcaaggagacagagagagaaaagaactcaacatagaacccactgatctaatgaacagggagaagaaaaacaaaatcccaagtatgcaagttgggttcatagatgccatctgcttgcaactgtatgaggccctgacccacgtgtcagaggactgtttccctttgctagatggctgcagaaagaacaggcagaaatggcaggcccttgcagaacagcag

SEQ ID NO: 8552 - DNA, 978 bp, Artificial Sequence
  source: /note="Description of Artificial Sequence: Synthetic Destabilizing Domain (DD)"
gaagaaacaagagagctacagtcgttagcggctgctgtggtgccatctgcccagacccttaaaattactgactttagcttcagtgactttgagctgtctgatctggaaacagcactgtgtacaattcggatgtttactgacctcaaccttgtgcagaacttccagatgaaacatgaggttctttgcagatggattttaagtgttaagaagaattatcggaagaatgttgcctatcataattggagacatgcctttaatacagctcagtgcatgtttgctgctctaaaagcaggcaaaattcagaacaagctgactgacctggagatacttgcattgctgattgctgcactaagccacgatttggatcaccgtggtgtgaataactcttacatacagcgaagtgaacatccacttgcccagctttactgccattcaatcatggaacaccatcattttgaccagtgcctgatgattcttaatagtccaggcaatcagattctcagtggcctctccattgaagaatataagaccacgttgaaaataatcaagcaagctattttagctacagacctagcactgtacattaagaggacgggagaattttttgaacttataagaaaaaatcaattcaatttggaagatcctcatcaaaaggagttgtttttggcaatgctgatgacagcttgtgatctttctgcaattacaaaaccctggcctattcaacaacggatagcagaacttgtagcaactgaattttttgatcaaggagacagagagagaaaagaactcaacatagaacccactgatctaatgaacagggagaagaaaaacaaaatcccaagtatgcaagttgggttcatagatgccatctgcttgcaactgtatgaggccctgacccacgtgtcagaggactgtttccctttgctagatggctgcagaaagaacaggcagaaatggcaggcccttgcagaacagcag

SEQ ID NO: 8553 - DNA, 978 bp, Artificial Sequence
  source: /note="Description of Artificial Sequence: Synthetic Destabilizing Domain (DD)"
gaagaaacaagagagctacagtcgttagcggctgctgtggtgccatctgcccagacccttaaaattactgactttagcttcagtgactttgagctgtctgatctggaaacagcactgtgtacaattcggatgtttactgacctcaaccttgtgcagaacttccagatgaaacatgaggttctttgcagatggattttaagtgttaagaagaattatcggaagaatgttgcctatcataattggagacatgcctttaatacagctcagtgcatgtttgctgctctaaaagcaggcaaaattcagaacaagctgactgacctggagatacttgcattgctgattgctgcactaagccacgatttggatcaccgtggtgtgaataactcttacatacagcgaagtgaacatccacttgcccagctttactgccattcaatcatggaacaccatcattttgaccagtgcctgatgattcttaatagtccaggcaatcagattctcagtggcctctccattgaagaatataagaccacgttgaaaataatcaagcaagctattttagctacagacctagcactgtacattaagaggaatggagaattttttgaacttataagaaaaaatcaattcaatttggaagatcctcatcaaaaggagttgtttttggcaatgctgatgacagcttgtgatctttctgcaattacaaaaccctggcctattcaacaacggatagcagaacttgtagcaactgaattttttgatcaaggagacagagagagaaaagaactcaacatagaacccactgatctaatgaacagggagaagaaaaacaaaatcccaagtatgcaagttgggttcatagatgccatctgcttgcaactgtatgaggccctgacccacgtgtcagaggactgtttccctttgctagatggctgcagaaagaacaggcagaaatggcaggcccttgcagaacagcag

SEQ ID NO: 8554 - DNA, 978 bp, Artificial Sequence
  source: /note="Description of Artificial Sequence: Synthetic Destabilizing Domain (DD)"
gaagaaacaagagagctacagtcgttagcggctgctgtggtgccatctgcccagacccttaaaattactgactttagcttcagtgactttgagctgtctgatctggaaacagcactgtgtacaattcggatgtttactgacctcaaccttgtgcagaacttccagatgaaacatgaggttctttgcagatggattttaagtgttaagaagaattatcggaagaatgttgcctatcataattggagacatgcctttaatacagctcagtgcatgtttgctgctctaaaagcaggcaaaattcagaacaagctgactgacctggagatacttgcattgctgattgctgcactaagccacgatttggatcaccgtggtgtgaataactcttacatacagcgaagtgaacatccacttgcccagctttactgccattcaatcatggaacaccatcattttgaccagtgcctgatgattcttaatagtccaggcaatcagattctcagtggcctctccattgaagaatataagaccacgttgaaaataatcaagcaagctattttagctacagacctagcactgtacattaagaggtgtggagaattttttgaacttataagaaaaaatcaattcaatttggaagatcctcatcaaaaggagttgtttttggcaatgctgatgacagcttgtgatctttctgcaattacaaaaccctggcctattcaacaacggatagcagaacttgtagcaactgaattttttgatcaaggagacagagagagaaaagaactcaacatagaacccactgatctaatgaacagggagaagaaaaacaaaatcccaagtatgcaagttgggttcatagatgccatctgcttgcaactgtatgaggccctgacccacgtgtcagaggactgtttccctttgctagatggctgcagaaagaacaggcagaaatggcaggcccttgcagaacagcag

SEQ ID NO: 8555 - protein, 326 aa, Artificial Sequence
  source: /note="Description of Artificial Sequence: Synthetic Destabilizing Domain (DD)"
EETRELQSLAAAVVPSAQTLKITDFSFSDFELSDLETALCTIRMFTDLNLVQNFQMKHEVLCRWILSVKKNYRKNVAYHNWRHAFNTAQCMFAALKAGKIQNKLTDLEILALLIAALSHDLDHRGVNNSYIQRSEHPLAQLYCHSIMEHHHFDQCLMILNSPGNQILSGLSIEEYKTTLKIIKQAILATDLALYIKRRGEFGELIRKNQFNLEDPHQKELFLAMLMTACDLSAITKPWPIQQRIAELVATEFFDQGDRERKELNIEPTDLMNREKKNKIPSMQVGFIDAICLQLYEALTHVSEDCFPLLDGCRKNRQKWQALAEQQ

SEQ ID NO: 8556 - protein, 326 aa, Artificial Sequence
  source: /note="Description of Artificial Sequence: Synthetic Destabilizing Domain (DD)"
EETRELQSLAAAVVPSAQTLKITDFSFSDFELSDLETALCTIRMFTDLNLVQNFQMKHEVLCRWILSVKKNYRKNVAYHNWRHAFNTAQCMFAALKAGKIQNKLTDLEILALLIAALSHDLDHRGVNNSYIQRSEHPLAQLYCHSIMEHHHFDQCLMILNSPGNQILSGLSIEEYKTTLKIIKQAILATDLALYIKRRGEFLELIRKNQFNLEDPHQKELFLAMLMTACDLSAITKPWPIQQRIAELVATEFFDQGDRERKELNIEPTDLMNREKKNKIPSMQVGFIDAICLQLYEALTHVSEDCFPLLDGCRKNRQKWQALAEQQ

SEQ ID NO: 8557 - protein, 326 aa, Artificial Sequence
  source: /note="Description of Artificial Sequence: Synthetic Destabilizing Domain (DD)"
EETRELQSLAAAVVPSAQTLKITDFSFSDFELSDLETALCTIRMFTDLNLVQNFQMKHEVLCRWILSVKKNYRKNVAYHNWRHAFNTAQCMFAALKAGKIQNKLTDLEILALLIAALSHDLDHRGVNNSYIQRSEHPLAQLYCHSIMEHHHFDQCLMILNSPGNQILSGLSIEEYKTTLKIIKQAILATDLALYIKRRGEFMELIRKNQFNLEDPHQKELFLAMLMTACDLSAITKPWPIQQRIAELVATEFFDQGDRERKELNIEPTDLMNREKKNKIPSMQVGFIDAICLQLYEALTHVSEDCFPLLDGCRKNRQKWQALAEQQ

SEQ ID NO: 8558 - protein, 326 aa, Artificial Sequence
  source: /note="Description of Artificial Sequence: Synthetic Destabilizing Domain (DD)"
EETRELQSLAAAVVPSAQTLKITDFSFSDFELSDLETALCTIRMFTDLNLVQNFQMKHEVLCRWILSVKKNYRKNVAYHNWRHAFNTAQCMFAALKAGKIQNKLTDLEILALLIAALSHDLDHRGVNNSYIQRSEHPLAQLYCHSIMEHHHFDQCLMILNSPGNQILSGLSIEEYKTTLKIIKQAILATDLALYIKRRGEFRELIRKNQFNLEDPHQKELFLAMLMTACDLSAITKPWPIQQRIAELVATEFFDQGDRERKELNIEPTDLMNREKKNKIPSMQVGFIDAICLQLYEALTHVSEDCFPLLDGCRKNRQKWQALAEQQ

SEQ ID NO: 8559 - protein, 326 aa, Artificial Sequence
  source: /note="Description of Artificial Sequence: Synthetic Destabilizing Domain (DD)"
EETRELQSLAAAVVPSAQTLKITDFSFSDFELSDLETALCTIRMFTDLNLVQNFQMKHEVLCRWILSVKKNYRKNVAYHNWRHAFNTAQCMFAALKAGKIQNKLTDLEILALLIAALSHDLDHRGVNNSYIQRSEHPLAQLYCHSIMEHHHFDQCLMILNSPGNQILSGLSIEEYKTTLKIIKQAILATDLALYIKRRGEFWELIRKNQFNLEDPHQKELFLAMLMTACDLSAITKPWPIQQRIAELVATEFFDQGDRERKELNIEPTDLMNREKKNKIPSMQVGFIDAICLQLYEALTHVSEDCFPLLDGCRKNRQKWQALAEQQ

SEQ ID NO: 8560 - protein, 326 aa, Artificial Sequence
  source: /note="Description of Artificial Sequence: Synthetic Destabilizing Domain (DD)"
EETRELQSLAAAVVPSAQTLKITDFSFSDFELSDLETALCTIRMFTDLNLVQNFQMKHEVLCRWILSVKKNYRKNVAYHNWRHAFNTAQCMFAALKAGKIQNKLTDLEILALLIAALSHDLDHRGVNNSYIQRSEHPLAQLYCHSIMEHHHFDQCLMILNSPGNQILSGLSIEEYKTTLKIIKQAILATDLALYIKRRGEFKELIRKNQFNLEDPHQKELFLAMLMTACDLSAITKPWPIQQRIAELVATEFFDQGDRERKELNIEPTDLMNREKKNKIPSMQVGFIDAICLQLYEALTHVSEDCFPLLDGCRKNRQKWQALAEQQ

SEQ ID NO: 8561 - protein, 326 aa, Artificial Sequence
  source: /note="Description of Artificial Sequence: Synthetic Destabilizing Domain (DD)"
EETRELQSLAAAVVPSAQTLKITDFSFSDFELSDLETALCTIRMFTDLNLVQNFQMKHEVLCRWILSVKKNYRKNVAYHNWRHAFNTAQCMFAALKAGKIQNKLTDLEILALLIAALSHDLDHRGVNNSYIQRSEHPLAQLYCHSIMEHHHFDQCLMILNSPGNQILSGLSIEEYKTTLKIIKQAILATDLALYIKRRGEFQELIRKNQFNLEDPHQKELFLAMLMTACDLSAITKPWPIQQRIAELVATEFFDQGDRERKELNIEPTDLMNREKKNKIPSMQVGFIDAICLQLYEALTHVSEDCFPLLDGCRKNRQKWQALAEQQ

SEQ ID NO: 8562 - protein, 326 aa, Artificial Sequence
  source: /note="Description of Artificial Sequence: Synthetic Destabilizing Domain (DD)"
EETRELQSLAAAVVPSAQTLKITDFSFSDFELSDLETALCTIRMFTDLNLVQNFQMKHEVLCRWILSVKKNYRKNVAYHNWRHAFNTAQCMFAALKAGKIQNKLTDLEILALLIAALSHDLDHRGVNNSYIQRSEHPLAQLYCHSIMEHHHFDQCLMILNSPGNQILSGLSIEEYKTTLKIIKQAILATDLALYIKRRGEFEELIRKNQFNLEDPHQKELFLAMLMTACDLSAITKPWPIQQRIAELVATEFFDQGDRERKELNIEPTDLMNREKKNKIPSMQVGFIDAICLQLYEALTHVSEDCFPLLDGCRKNRQKWQALAEQQ

SEQ ID NO: 8563 - protein, 326 aa, Artificial Sequence
  source: /note="Description of Artificial Sequence: Synthetic Destabilizing Domain (DD)"
EETRELQSLAAAVVPSAQTLKITDFSFSDFELSDLETALCTIRMFTDLNLVQNFQMKHEVLCRWILSVKKNYRKNVAYHNWRHAFNTAQCMFAALKAGKIQNKLTDLEILALLIAALSHDLDHRGVNNSYIQRSEHPLAQLYCHSIMEHHHFDQCLMILNSPGNQILSGLSIEEYKTTLKIIKQAILATDLALYIKRRGEFSELIRKNQFNLEDPHQKELFLAMLMTACDLSAITKPWPIQQRIAELVATEFFDQGDRERKELNIEPTDLMNREKKNKIPSMQVGFIDAICLQLYEALTHVSEDCFPLLDGCRKNRQKWQALAEQQ

SEQ ID NO: 8564 - protein, 326 aa, Artificial Sequence
  source: /note="Description of Artificial Sequence: Synthetic Destabilizing Domain (DD)"
EETRELQSLAAAVVPSAQTLKITDFSFSDFELSDLETALCTIRMFTDLNLVQNFQMKHEVLCRWILSVKKNYRKNVAYHNWRHAFNTAQCMFAALKAGKIQNKLTDLEILALLIAALSHDLDHRGVNNSYIQRSEHPLAQLYCHSIMEHHHFDQCLMILNSPGNQILSGLSIEEYKTTLKIIKQAILATDLALYIKRRGEFPELIRKNQFNLEDPHQKELFLAMLMTACDLSAITKPWPIQQRIAELVATEFFDQGDRERKELNIEPTDLMNREKKNKIPSMQVGFIDAICLQLYEALTHVSEDCFPLLDGCRKNRQKWQALAEQQ

SEQ ID NO: 8565 - protein, 326 aa, Artificial Sequence
  source: /note="Description of Artificial Sequence: Synthetic Destabilizing Domain (DD)"
EETRELQSLAAAVVPSAQTLKITDFSFSDFELSDLETALCTIRMFTDLNLVQNFQMKHEVLCRWILSVKKNYRKNVAYHNWRHAFNTAQCMFAALKAGKIQNKLTDLEILALLIAALSHDLDHRGVNNSYIQRSEHPLAQLYCHSIMEHHHFDQCLMILNSPGNQILSGLSIEEYKTTLKIIKQAILATDLALYIKRRGEFVELIRKNQFNLEDPHQKELFLAMLMTACDLSAITKPWPIQQRIAELVATEFFDQGDRERKELNIEPTDLMNREKKNKIPSMQVGFIDAICLQLYEALTHVSEDCFPLLDGCRKNRQKWQALAEQQ

SEQ ID NO: 8566 - protein, 326 aa, Artificial Sequence
  source: /note="Description of Artificial Sequence: Synthetic Destabilizing Domain (DD)"
EETRELQSLAAAVVPSAQTLKITDFSFSDFELSDLETALCTIRMFTDLNLVQNFQMKHEVLCRWILSVKKNYRKNVAYHNWRHAFNTAQCMFAALKAGKIQNKLTDLEILALLIAALSHDLDHRGVNNSYIQRSEHPLAQLYCHSIMEHHHFDQCLMILNSPGNQILSGLSIEEYKTTLKIIKQAILATDLALYIKRRGEFIELIRKNQFNLEDPHQKELFLAMLMTACDLSAITKPWPIQQRIAELVATEFFDQGDRERKELNIEPTDLMNREKKNKIPSMQVGFIDAICLQLYEALTHVSEDCFPLLDGCRKNRQKWQALAEQQ

SEQ ID NO: 8567 - protein, 326 aa, Artificial Sequence
  source: /note="Description of Artificial Sequence: Synthetic Destabilizing Domain (DD)"
EETRELQSLAAAVVPSAQTLKITDFSFSDFELSDLETALCTIRMFTDLNLVQNFQMKHEVLCRWILSVKKNYRKNVAYHNWRHAFNTAQCMFAALKAGKIQNKLTDLEILALLIAALSHDLDHRGVNNSYIQRSEHPLAQLYCHSIMEHHHFDQCLMILNSPGNQILSGLSIEEYKTTLKIIKQAILATDLALYIKRRGEFCELIRKNQFNLEDPHQKELFLAMLMTACDLSAITKPWPIQQRIAELVATEFFDQGDRERKELNIEPTDLMNREKKNKIPSMQVGFIDAICLQLYEALTHVSEDCFPLLDGCRKNRQKWQALAEQQ

SEQ ID NO: 8568 - protein, 326 aa, Artificial Sequence
  source: /note="Description of Artificial Sequence: Synthetic Destabilizing Domain (DD)"
EETRELQSLAAAVVPSAQTLKITDFSFSDFELSDLETALCTIRMFTDLNLVQNFQMKHEVLCRWILSVKKNYRKNVAYHNWRHAFNTAQCMFAALKAGKIQNKLTDLEILALLIAALSHDLDHRGVNNSYIQRSEHPLAQLYCHSIMEHHHFDQCLMILNSPGNQILSGLSIEEYKTTLKIIKQAILATDLALYIKRRGEFYELIRKNQFNLEDPHQKELFLAMLMTACDLSAITKPWPIQQRIAELVATEFFDQGDRERKELNIEPTDLMNREKKNKIPSMQVGFIDAICLQLYEALTHVSEDCFPLLDGCRKNRQKWQALAEQQ

SEQ ID NO: 8569 - protein, 326 aa, Artificial Sequence
  source: /note="Description of Artificial Sequence: Synthetic Destabilizing Domain (DD)"
EETRELQSLAAAVVPSAQTLKITDFSFSDFELSDLETALCTIRMFTDLNLVQNFQMKHEVLCRWILSVKKNYRKNVAYHNWRHAFNTAQCMFAALKAGKIQNKLTDLEILALLIAALSHDLDHRGVNNSYIQRSEHPLAQLYCHSIMEHHHFDQCLMILNSPGNQILSGLSIEEYKTTLKIIKQAILATDLALYIKRRGEFHELIRKNQFNLEDPHQKELFLAMLMTACDLSAITKPWPIQQRIAELVATEFFDQGDRERKELNIEPTDLMNREKKNKIPSMQVGFIDAICLQLYEALTHVSEDCFPLLDGCRKNRQKWQALAEQQ

SEQ ID NO: 8570 - protein, 326 aa, Artificial Sequence
  source: /note="Description of Artificial Sequence: Synthetic Destabilizing Domain (DD)"
EETRELQSLAAAVVPSAQTLKITDFSFSDFELSDLETALCTIRMFTDLNLVQNFQMKHEVLCRWILSVKKNYRKNVAYHNWRHAFNTAQCMFAALKAGKIQNKLTDLEILALLIAALSHDLDHRGVNNSYIQRSEHPLAQLYCHSIMEHHHFDQCLMILNSPGNQILSGLSIEEYKTTLKIIKQAILATDLALYIKRRGEFNELIRKNQFNLEDPHQKELFLAMLMTACDLSAITKPWPIQQRIAELVATEFFDQGDRERKELNIEPTDLMNREKKNKIPSMQVGFIDAICLQLYEALTHVSEDCFPLLDGCRKNRQKWQALAEQQ

SEQ ID NO: 8571 - protein, 326 aa, Artificial Sequence
  source: /note="Description of Artificial Sequence: Synthetic Destabilizing Domain (DD)"
EETRELQSLAAAVVPSAQTLKITDFSFSDFELSDLETALCTIRMFTDLNLVQNFQMKHEVLCRWILSVKKNYRKNVAYHNWRHAFNTAQCMFAALKAGKIQNKLTDLEILALLIAALSHDLDHRGVNNSYIQRSEHPLAQLYCHSIMEHHHFDQCLMILNSPGNQILSGLSIEEYKTTLKIIKQAILATDLALYIKRRGEFDELIRKNQFNLEDPHQKELFLAMLMTACDLSAITKPWPIQQRIAELVATEFFDQGDRERKELNIEPTDLMNREKKNKIPSMQVGFIDAICLQLYEALTHVSEDCFPLLDGCRKNRQKWQALAEQQ

SEQ ID NO: 8572 - protein, 326 aa, Artificial Sequence
  source: /note="Description of Artificial Sequence: Synthetic Destabilizing Domain (DD)"
EETRELQSLAAAVVPSAQTLKITDFSFSDFELSDLETALCTIRMFTDLNLVQNFQMKHEVLCRWILSVKKNYRKNVAYHNWRHAFNTAQCMFAALKAGKIQNKLTDLEILALLIAALSHDLDHRGVNNSYIQRSEHPLAQLYCHSIMEHHHFDQCLMILNSPGNQILSGLSIEEYKTTLKIIKQAILATDLALYIKRRGEFTELIRKNQFNLEDPHQKELFLAMLMTACDLSAITKPWPIQQRIAELVATEFFDQGDRERKELNIEPTDLMNREKKNKIPSMQVGFIDAICLQLYEALTHVSEDCFPLLDGCRKNRQKWQALAEQQ

SEQ ID NO: 8573 - protein, 569 aa, Artificial Sequence
  source: /note="Description of Artificial Sequence: Synthetic polypeptide"
MVSKGAELFTGIVPILIELNGDVNGHKFSVSGEGEGDATYGKLTLKFICTTGKLPVPWPTLVTTLSYGVQCFSRYPDHMKQHDFFKSAMPEGYIQERTIFFEDDGNYKSRAEVKFEGDTLVNRIELTGTDFKEDGNILGNKMEYNYNAHNVYIMTDKAKNGIKVNFKIRHNIEDGSVQLADHYQQNTPIGDGPVLLPDNHYLSTQSALSKDPNEKRDHMIYFGFVTAAAITHGMDELYKGSEETRELQSLAAAVVPSAQTLKITDFSFSDFELSDLETALCTIRMFTDLNLVQNFQMKHEVLCRWILSVKKNYRKNVAYHNWRHAFNTAQCMFAALKAGKIQNKLTDLEILALLIAALSHDLDHRGVNNSYIQRSEHPLAQLYCHSIMEHHHFDQCLMILNSPGNQILSGLSIEEYKTTLKIIKQAILATDLALYIKRRGEFGELIRKNQFNLEDPHQKELFLAMLMTACDLSAITKPWPIQQRIAELVATEFFDQGDRERKELNIEPTDLMNREKKNKIPSMQVGFIDAICLQLYEALTHVSEDCFPLLDGCRKNRQKWQALAEQQSR

SEQ ID NO: 8574 - protein, 569 aa, Artificial Sequence
  source: /note="Description of Artificial Sequence: Synthetic polypeptide"
MVSKGAELFTGIVPILIELNGDVNGHKFSVSGEGEGDATYGKLTLKFICTTGKLPVPWPTLVTTLSYGVQCFSRYPDHMKQHDFFKSAMPEGYIQERTIFFEDDGNYKSRAEVKFEGDTLVNRIELTGTDFKEDGNILGNKMEYNYNAHNVYIMTDKAKNGIKVNFKIRHNIEDGSVQLADHYQQNTPIGDGPVLLPDNHYLSTQSALSKDPNEKRDHMIYFGFVTAAAITHGMDELYKGSEETRELQSLAAAVVPSAQTLKITDFSFSDFELSDLETALCTIRMFTDLNLVQNFQMKHEVLCRWILSVKKNYRKNVAYHNWRHAFNTAQCMFAALKAGKIQNKLTDLEILALLIAALSHDLDHRGVNNSYIQRSEHPLAQLYCHSIMEHHHFDQCLMILNSPGNQILSGLSIEEYKTTLKIIKQAILATDLALYIKRRGEFAELIRKNQFNLEDPHQKELFLAMLMTACDLSAITKPWPIQQRIAELVATEFFDQGDRERKELNIEPTDLMNREKKNKIPSMQVGFIDAICLQLYEALTHVSEDCFPLLDGCRKNRQKWQALAEQQSR

SEQ ID NO: 8575 - protein, 569 aa, Artificial Sequence
  source: /note="Description of Artificial Sequence: Synthetic polypeptide"
MVSKGAELFTGIVPILIELNGDVNGHKFSVSGEGEGDATYGKLTLKFICTTGKLPVPWPTLVTTLSYGVQCFSRYPDHMKQHDFFKSAMPEGYIQERTIFFEDDGNYKSRAEVKFEGDTLVNRIELTGTDFKEDGNILGNKMEYNYNAHNVYIMTDKAKNGIKVNFKIRHNIEDGSVQLADHYQQNTPIGDGPVLLPDNHYLSTQSALSKDPNEKRDHMIYFGFVTAAAITHGMDELYKGSEETRELQSLAAAVVPSAQTLKITDFSFSDFELSDLETALCTIRMFTDLNLVQNFQMKHEVLCRWILSVKKNYRKNVAYHNWRHAFNTAQCMFAALKAGKIQNKLTDLEILALLIAALSHDLDHRGVNNSYIQRSEHPLAQLYCHSIMEHHHFDQCLMILNSPGNQILSGLSIEEYKTTLKIIKQAILATDLALYIKRRGEFLELIRKNQFNLEDPHQKELFLAMLMTACDLSAITKPWPIQQRIAELVATEFFDQGDRERKELNIEPTDLMNREKKNKIPSMQVGFIDAICLQLYEALTHVSEDCFPLLDGCRKNRQKWQALAEQQSR

SEQ ID NO: 8576 - protein, 569 aa, Artificial Sequence
  source: /note="Description of Artificial Sequence: Synthetic polypeptide"
MVSKGAELFTGIVPILIELNGDVNGHKFSVSGEGEGDATYGKLTLKFICTTGKLPVPWPTLVTTLSYGVQCFSRYPDHMKQHDFFKSAMPEGYIQERTIFFEDDGNYKSRAEVKFEGDTLVNRIELTGTDFKEDGNILGNKMEYNYNAHNVYIMTDKAKNGIKVNFKIRHNIEDGSVQLADHYQQNTPIGDGPVLLPDNHYLSTQSALSKDPNEKRDHMIYFGFVTAAAITHGMDELYKGSEETRELQSLAAAVVPSAQTLKITDFSFSDFELSDLETALCTIRMFTDLNLVQNFQMKHEVLCRWILSVKKNYRKNVAYHNWRHAFNTAQCMFAALKAGKIQNKLTDLEILALLIAALSHDLDHRGVNNSYIQRSEHPLAQLYCHSIMEHHHFDQCLMILNSPGNQILSGLSIEEYKTTLKIIKQAILATDLALYIKRRGEFMELIRKNQFNLEDPHQKELFLAMLMTACDLSAITKPWPIQQRIAELVATEFFDQGDRERKELNIEPTDLMNREKKNKIPSMQVGFIDAICLQLYEALTHVSEDCFPLLDGCRKNRQKWQALAEQQSR

SEQ ID NO: 8577 - protein, 569 aa, Artificial Sequence
  source: /note="Description of Artificial Sequence: Synthetic polypeptide"
MVSKGAELFTGIVPILIELNGDVNGHKFSVSGEGEGDATYGKLTLKFICTTGKLPVPWPTLVTTLSYGVQCFSRYPDHMKQHDFFKSAMPEGYIQERTIFFEDDGNYKSRAEVKFEGDTLVNRIELTGTDFKEDGNILGNKMEYNYNAHNVYIMTDKAKNGIKVNFKIRHNIEDGSVQLADHYQQNTPIGDGPVLLPDNHYLSTQSALSKDPNEKRDHMIYFGFVTAAAITHGMDELYKGSEETRELQSLAAAVVPSAQTLKITDFSFSDFELSDLETALCTIRMFTDLNLVQNFQMKHEVLCRWILSVKKNYRKNVAYHNWRHAFNTAQCMFAALKAGKIQNKLTDLEILALLIAALSHDLDHRGVNNSYIQRSEHPLAQLYCHSIMEHHHFDQCLMILNSPGNQILSGLSIEEYKTTLKIIKQAILATDLALYIKRRGEFRELIRKNQFNLEDPHQKELFLAMLMTACDLSAITKPWPIQQRIAELVATEFFDQGDRERKELNIEPTDLMNREKKNKIPSMQVGFIDAICLQLYEALTHVSEDCFPLLDGCRKNRQKWQALAEQQSR

SEQ ID NO: 8578 - protein, 569 aa, Artificial Sequence
  source: /note="Description of Artificial Sequence: Synthetic polypeptide"
MVSKGAELFTGIVPILIELNGDVNGHKFSVSGEGEGDATYGKLTLKFICTTGKLPVPWPTLVTTLSYGVQCFSRYPDHMKQHDFFKSAMPEGYIQERTIFFEDDGNYKSRAEVKFEGDTLVNRIELTGTDFKEDGNILGNKMEYNYNAHNVYIMTDKAKNGIKVNFKIRHNIEDGSVQLADHYQQNTPIGDGPVLLPDNHYLSTQSALSKDPNEKRDHMIYFGFVTAAAITHGMDELYKGSEETRELQSLAAAVVPSAQTLKITDFSFSDFELSDLETALCTIRMFTDLNLVQNFQMKHEVLCRWILSVKKNYRKNVAYHNWRHAFNTAQCMFAALKAGKIQNKLTDLEILALLIAALSHDLDHRGVNNSYIQRSEHPLAQLYCHSIMEHHHFDQCLMILNSPGNQILSGLSIEEYKTTLKIIKQAILATDLALYIKRRGEFWELIRKNQFNLEDPHQKELFLAMLMTACDLSAITKPWPIQQRIAELVATEFFDQGDRERKELNIEPTDLMNREKKNKIPSMQVGFIDAICLQLYEALTHVSEDCFPLLDGCRKNRQKWQALAEQQSR

SEQ ID NO: 8579 - protein, 569 aa, Artificial Sequence
  source: /note="Description of Artificial Sequence: Synthetic polypeptide"
MVSKGAELFTGIVPILIELNGDVNGHKFSVSGEGEGDATYGKLTLKFICTTGKLPVPWPTLVTTLSYGVQCFSRYPDHMKQHDFFKSAMPEGYIQERTIFFEDDGNYKSRAEVKFEGDTLVNRIELTGTDFKEDGNILGNKMEYNYNAHNVYIMTDKAKNGIKVNFKIRHNIEDGSVQLADHYQQNTPIGDGPVLLPDNHYLSTQSALSKDPNEKRDHMIYFGFVTAAAITHGMDELYKGSEETRELQSLAAAVVPSAQTLKITDFSFSDFELSDLETALCTIRMFTDLNLVQNFQMKHEVLCRWILSVKKNYRKNVAYHNWRHAFNTAQCMFAALKAGKIQNKLTDLEILALLIAALSHDLDHRGVNNSYIQRSEHPLAQLYCHSIMEHHHFDQCLMILNSPGNQILSGLSIEEYKTTLKIIKQAILATDLALYIKRRGEFKELIRKNQFNLEDPHQKELFLAMLMTACDLSAITKPWPIQQRIAELVATEFFDQGDRERKELNIEPTDLMNREKKNKIPSMQVGFIDAICLQLYEALTHVSEDCFPLLDGCRKNRQKWQALAEQQSR

SEQ ID NO: 8580 - protein, 569 aa, Artificial Sequence
  source: /note="Description of Artificial Sequence: Synthetic polypeptide"
MVSKGAELFTGIVPILIELNGDVNGHKFSVSGEGEGDATYGKLTLKFICTTGKLPVPWPTLVTTLSYGVQCFSRYPDHMKQHDFFKSAMPEGYIQERTIFFEDDGNYKSRAEVKFEGDTLVNRIELTGTDFKEDGNILGNKMEYNYNAHNVYIMTDKAKNGIKVNFKIRHNIEDGSVQLADHYQQNTPIGDGPVLLPDNHYLSTQSALSKDPNEKRDHMIYFGFVTAAAITHGMDELYKGSEETRELQSLAAAVVPSAQTLKITDFSFSDFELSDLETALCTIRMFTDLNLVQNFQMKHEVLCRWILSVKKNYRKNVAYHNWRHAFNTAQCMFAALKAGKIQNKLTDLEILALLIAALSHDLDHRGVNNSYIQRSEHPLAQLYCHSIMEHHHFDQCLMILNSPGNQILSGLSIEEYKTTLKIIKQAILATDLALYIKRRGEFQELIRKNQFNLEDPHQKELFLAMLMTACDLSAITKPWPIQQRIAELVATEFFDQGDRERKELNIEPTDLMNREKKNKIPSMQVGFIDAICLQLYEALTHVSEDCFPLLDGCRKNRQKWQALAEQQSR

SEQ ID NO: 8581 - protein, 569 aa, Artificial Sequence
  source: /note="Description of Artificial Sequence: Synthetic polypeptide"
MVSKGAELFTGIVPILIELNGDVNGHKFSVSGEGEGDATYGKLTLKFICTTGKLPVPWPTLVTTLSYGVQCFSRYPDHMKQHDFFKSAMPEGYIQERTIFFEDDGNYKSRAEVKFEGDTLVNRIELTGTDFKEDGNILGNKMEYNYNAHNVYIMTDKAKNGIKVNFKIRHNIEDGSVQLADHYQQNTPIGDGPVLLPDNHYLSTQSALSKDPNEKRDHMIYFGFVTAAAITHGMDELYKGSEETRELQSLAAAVVPSAQTLKITDFSFSDFELSDLETALCTIRMFTDLNLVQNFQMKHEVLCRWILSVKKNYRKNVAYHNWRHAFNTAQCMFAALKAGKIQNKLTDLEILALLIAALSHDLDHRGVNNSYIQRSEHPLAQLYCHSIMEHHHFDQCLMILNSPGNQILSGLSIEEYKTTLKIIKQAILATDLALYIKRRGEFEELIRKNQFNLEDPHQKELFLAMLMTACDLSAITKPWPIQQRIAELVATEFFDQGDRERKELNIEPTDLMNREKKNKIPSMQVGFIDAICLQLYEALTHVSEDCFPLLDGCRKNRQKWQALAEQQSR

SEQ ID NO: 8582 - protein, 569 aa, Artificial Sequence
  source: /note="Description of Artificial Sequence: Synthetic polypeptide"
MVSKGAELFTGIVPILIELNGDVNGHKFSVSGEGEGDATYGKLTLKFICTTGKLPVPWPTLVTTLSYGVQCFSRYPDHMKQHDFFKSAMPEGYIQERTIFFEDDGNYKSRAEVKFEGDTLVNRIELTGTDFKEDGNILGNKMEYNYNAHNVYIMTDKAKNGIKVNFKIRHNIEDGSVQLADHYQQNTPIGDGPVLLPDNHYLSTQSALSKDPNEKRDHMIYFGFVTAAAITHGMDELYKGSEETRELQSLAAAVVPSAQTLKITDFSFSDFELSDLETALCTIRMFTDLNLVQNFQMKHEVLCRWILSVKKNYRKNVAYHNWRHAFNTAQCMFAALKAGKIQNKLTDLEILALLIAALSHDLDHRGVNNSYIQRSEHPLAQLYCHSIMEHHHFDQCLMILNSPGNQILSGLSIEEYKTTLKIIKQAILATDLALYIKRRGEFSELIRKNQFNLEDPHQKELFLAMLMTACDLSAITKPWPIQQRIAELVATEFFDQGDRERKELNIEPTDLMNREKKNKIPSMQVGFIDAICLQLYEALTHVSEDCFPLLDGCRKNRQKWQALAEQQSR

SEQ ID NO: 8583 - protein, 569 aa, Artificial Sequence
  source: /note="Description of Artificial Sequence: Synthetic polypeptide"
MVSKGAELFTGIVPILIELNGDVNGHKFSVSGEGEGDATYGKLTLKFICTTGKLPVPWPTLVTTLSYGVQCFSRYPDHMKQHDFFKSAMPEGYIQERTIFFEDDGNYKSRAEVKFEGDTLVNRIELTGTDFKEDGNILGNKMEYNYNAHNVYIMTDKAKNGIKVNFKIRHNIEDGSVQLADHYQQNTPIGDGPVLLPDNHYLSTQSALSKDPNEKRDHMIYFGFVTAAAITHGMDELYKGSEETRELQSLAAAVVPSAQTLKITDFSFSDFELSDLETALCTIRMFTDLNLVQNFQMKHEVLCRWILSVKKNYRKNVAYHNWRHAFNTAQCMFAALKAGKIQNKLTDLEILALLIAALSHDLDHRGVNNSYIQRSEHPLAQLYCHSIMEHHHFDQCLMILNSPGNQILSGLSIEEYKTTLKIIKQAILATDLALYIKRRGEFPELIRKNQFNLEDPHQKELFLAMLMTACDLSAITKPWPIQQRIAELVATEFFDQGDRERKELNIEPTDLMNREKKNKIPSMQVGFIDAICLQLYEALTHVSEDCFPLLDGCRKNRQKWQALAEQQSR

SEQ ID NO: 8584 - protein, 569 aa, Artificial Sequence
  source: /note="Description of Artificial Sequence: Synthetic polypeptide"
MVSKGAELFTGIVPILIELNGDVNGHKFSVSGEGEGDATYGKLTLKFICTTGKLPVPWPTLVTTLSYGVQCFSRYPDHMKQHDFFKSAMPEGYIQERTIFFEDDGNYKSRAEVKFEGDTLVNRIELTGTDFKEDGNILGNKMEYNYNAHNVYIMTDKAKNGIKVNFKIRHNIEDGSVQLADHYQQNTPIGDGPVLLPDNHYLSTQSALSKDPNEKRDHMIYFGFVTAAAITHGMDELYKGSEETRELQSLAAAVVPSAQTLKITDFSFSDFELSDLETALCTIRMFTDLNLVQNFQMKHEVLCRWILSVKKNYRKNVAYHNWRHAFNTAQCMFAALKAGKIQNKLTDLEILALLIAALSHDLDHRGVNNSYIQRSEHPLAQLYCHSIMEHHHFDQCLMILNSPGNQILSGLSIEEYKTTLKIIKQAILATDLALYIKRRGEFVELIRKNQFNLEDPHQKELFLAMLMTACDLSAITKPWPIQQRIAELVATEFFDQGDRERKELNIEPTDLMNREKKNKIPSMQVGFIDAICLQLYEALTHVSEDCFPLLDGCRKNRQKWQALAEQQSR

SEQ ID NO: 8585 - protein, 569 aa, Artificial Sequence
  source: /note="Description of Artificial Sequence: Synthetic polypeptide"
MVSKGAELFTGIVPILIELNGDVNGHKFSVSGEGEGDATYGKLTLKFICTTGKLPVPWPTLVTTLSYGVQCFSRYPDHMKQHDFFKSAMPEGYIQERTIFFEDDGNYKSRAEVKFEGDTLVNRIELTGTDFKEDGNILGNKMEYNYNAHNVYIMTDKAKNGIKVNFKIRHNIEDGSVQLADHYQQNTPIGDGPVLLPDNHYLSTQSALSKDPNEKRDHMIYFGFVTAAAITHGMDELYKGSEETRELQSLAAAVVPSAQTLKITDFSFSDFELSDLETALCTIRMFTDLNLVQNFQMKHEVLCRWILSVKKNYRKNVAYHNWRHAFNTAQCMFAALKAGKIQNKLTDLEILALLIAALSHDLDHRGVNNSYIQRSEHPLAQLYCHSIMEHHHFDQCLMILNSPGNQILSGLSIEEYKTTLKIIKQAILATDLALYIKRRGEFIELIRKNQFNLEDPHQKELFLAMLMTACDLSAITKPWPIQQRIAELVATEFFDQGDRERKELNIEPTDLMNREKKNKIPSMQVGFIDAICLQLYEALTHVSEDCFPLLDGCRKNRQKWQALAEQQSR

SEQ ID NO: 8586 - protein, 569 aa, Artificial Sequence
  source: /note="Description of Artificial Sequence: Synthetic polypeptide"
MVSKGAELFTGIVPILIELNGDVNGHKFSVSGEGEGDATYGKLTLKFICTTGKLPVPWPTLVTTLSYGVQCFSRYPDHMKQHDFFKSAMPEGYIQERTIFFEDDGNYKSRAEVKFEGDTLVNRIELTGTDFKEDGNILGNKMEYNYNAHNVYIMTDKAKNGIKVNFKIRHNIEDGSVQLADHYQQNTPIGDGPVLLPDNHYLSTQSALSKDPNEKRDHMIYFGFVTAAAITHGMDELYKGSEETRELQSLAAAVVPSAQTLKITDFSFSDFELSDLETALCTIRMFTDLNLVQNFQMKHEVLCRWILSVKKNYRKNVAYHNWRHAFNTAQCMFAALKAGKIQNKLTDLEILALLIAALSHDLDHRGVNNSYIQRSEHPLAQLYCHSIMEHHHFDQCLMILNSPGNQILSGLSIEEYKTTLKIIKQAILATDLALYIKRRGEFCELIRKNQFNLEDPHQKELFLAMLMTACDLSAITKPWPIQQRIAELVATEFFDQGDRERKELNIEPTDLMNREKKNKIPSMQVGFIDAICLQLYEALTHVSEDCFPLLDGCRKNRQKWQALAEQQSR

SEQ ID NO: 8587 - protein, 569 aa, Artificial Sequence
  source: /note="Description of Artificial Sequence: Synthetic polypeptide"
MVSKGAELFTGIVPILIELNGDVNGHKFSVSGEGEGDATYGKLTLKFICTTGKLPVPWPTLVTTLSYGVQCFSRYPDHMKQHDFFKSAMPEGYIQERTIFFEDDGNYKSRAEVKFEGDTLVNRIELTGTDFKEDGNILGNKMEYNYNAHNVYIMTDKAKNGIKVNFKIRHNIEDGSVQLADHYQQNTPIGDGPVLLPDNHYLSTQSALSKDPNEKRDHMIYFGFVTAAAITHGMDELYKGSEETRELQSLAAAVVPSAQTLKITDFSFSDFELSDLETALCTIRMFTDLNLVQNFQMKHEVLCRWILSVKKNYRKNVAYHNWRHAFNTAQCMFAALKAGKIQNKLTDLEILALLIAALSHDLDHRGVNNSYIQRSEHPLAQLYCHSIMEHHHFDQCLMILNSPGNQILSGLSIEEYKTTLKIIKQAILATDLALYIKRRGEFYELIRKNQFNLEDPHQKELFLAMLMTACDLSAITKPWPIQQRIAELVATEFFDQGDRERKELNIEPTDLMNREKKNKIPSMQVGFIDAICLQLYEALTHVSEDCFPLLDGCRKNRQKWQALAEQQSR

SEQ ID NO: 8588 - protein, 569 aa, Artificial Sequence
  source: /note="Description of Artificial Sequence: Synthetic polypeptide"
MVSKGAELFTGIVPILIELNGDVNGHKFSVSGEGEGDATYGKLTLKFICTTGKLPVPWPTLVTTLSYGVQCFSRYPDHMKQHDFFKSAMPEGYIQERTIFFEDDGNYKSRAEVKFEGDTLVNRIELTGTDFKEDGNILGNKMEYNYNAHNVYIMTDKAKNGIKVNFKIRHNIEDGSVQLADHYQQNTPIGDGPVLLPDNHYLSTQSALSKDPNEKRDHMIYFGFVTAAAITHGMDELYKGSEETRELQSLAAAVVPSAQTLKITDFSFSDFELSDLETALCTIRMFTDLNLVQNFQMKHEVLCRWILSVKKNYRKNVAYHNWRHAFNTAQCMFAALKAGKIQNKLTDLEILALLIAALSHDLDHRGVNNSYIQRSEHPLAQLYCHSIMEHHHFDQCLMILNSPGNQILSGLSIEEYKTTLKIIKQAILATDLALYIKRRGEFHELIRKNQFNLEDPHQKELFLAMLMTACDLSAITKPWPIQQRIAELVATEFFDQGDRERKELNIEPTDLMNREKKNKIPSMQVGFIDAICLQLYEALTHVSEDCFPLLDGCRKNRQKWQALAEQQSR

SEQ ID NO: 8589 - protein, 569 aa, Artificial Sequence
  source: /note="Description of Artificial Sequence: Synthetic polypeptide"
MVSKGAELFTGIVPILIELNGDVNGHKFSVSGEGEGDATYGKLTLKFICTTGKLPVPWPTLVTTLSYGVQCFSRYPDHMKQHDFFKSAMPEGYIQERTIFFEDDGNYKSRAEVKFEGDTLVNRIELTGTDFKEDGNILGNKMEYNYNAHNVYIMTDKAKNGIKVNFKIRHNIEDGSVQLADHYQQNTPIGDGPVLLPDNHYLSTQSALSKDPNEKRDHMIYFGFVTAAAITHGMDELYKGSEETRELQSLAAAVVPSAQTLKITDFSFSDFELSDLETALCTIRMFTDLNLVQNFQMKHEVLCRWILSVKKNYRKNVAYHNWRHAFNTAQCMFAALKAGKIQNKLTDLEILALLIAALSHDLDHRGVNNSYIQRSEHPLAQLYCHSIMEHHHFDQCLMILNSPGNQILSGLSIEEYKTTLKIIKQAILATDLALYIKRRGEFNELIRKNQFNLEDPHQKELFLAMLMTACDLSAITKPWPIQQRIAELVATEFFDQGDRERKELNIEPTDLMNREKKNKIPSMQVGFIDAICLQLYEALTHVSEDCFPLLDGCRKNRQKWQALAEQQSR

SEQ ID NO: 8590 - protein, 569 aa, Artificial Sequence
  source: /note="Description of Artificial Sequence: Synthetic polypeptide"
MVSKGAELFTGIVPILIELNGDVNGHKFSVSGEGEGDATYGKLTLKFICTTGKLPVPWPTLVTTLSYGVQCFSRYPDHMKQHDFFKSAMPEGYIQERTIFFEDDGNYKSRAEVKFEGDTLVNRIELTGTDFKEDGNILGNKMEYNYNAHNVYIMTDKAKNGIKVNFKIRHNIEDGSVQLADHYQQNTPIGDGPVLLPDNHYLSTQSALSKDPNEKRDHMIYFGFVTAAAITHGMDELYKGSEETRELQSLAAAVVPSAQTLKITDFSFSDFELSDLETALCTIRMFTDLNLVQNFQMKHEVLCRWILSVKKNYRKNVAYHNWRHAFNTAQCMFAALKAGKIQNKLTDLEILALLIAALSHDLDHRGVNNSYIQRSEHPLAQLYCHSIMEHHHFDQCLMILNSPGNQILSGLSIEEYKTTLKIIKQAILATDLALYIKRRGEFDELIRKNQFNLEDPHQKELFLAMLMTACDLSAITKPWPIQQRIAELVATEFFDQGDRERKELNIEPTDLMNREKKNKIPSMQVGFIDAICLQLYEALTHVSEDCFPLLDGCRKNRQKWQALAEQQSR

SEQ ID NO: 8591 - protein, 569 aa, Artificial Sequence
  source: /note="Description of Artificial Sequence: Synthetic polypeptide"
MVSKGAELFTGIVPILIELNGDVNGHKFSVSGEGEGDATYGKLTLKFICTTGKLPVPWPTLVTTLSYGVQCFSRYPDHMKQHDFFKSAMPEGYIQERTIFFEDDGNYKSRAEVKFEGDTLVNRIELTGTDFKEDGNILGNKMEYNYNAHNVYIMTDKAKNGIKVNFKIRHNIEDGSVQLADHYQQNTPIGDGPVLLPDNHYLSTQSALSKDPNEKRDHMIYFGFVTAAAITHGMDELYKGSEETRELQSLAAAVVPSAQTLKITDFSFSDFELSDLETALCTIRMFTDLNLVQNFQMKHEVLCRWILSVKKNYRKNVAYHNWRHAFNTAQCMFAALKAGKIQNKLTDLEILALLIAALSHDLDHRGVNNSYIQRSEHPLAQLYCHSIMEHHHFDQCLMILNSPGNQILSGLSIEEYKTTLKIIKQAILATDLALYIKRRGEFTELIRKNQFNLEDPHQKELFLAMLMTACDLSAITKPWPIQQRIAELVATEFFDQGDRERKELNIEPTDLMNREKKNKIPSMQVGFIDAICLQLYEALTHVSEDCFPLLDGCRKNRQKWQALAEQQSR

SEQ ID NO: 8592 - DNA, 978 bp, Artificial Sequence
  source: /note="Description of Artificial Sequence: Synthetic Destabilizing Domain (DD)"
gaagaaacaagagagctacagtcgttagcggctgctgtggtgccatctgcccagacccttaaaattactgactttagcttcagtgactttgagctgtctgatctggaaacagcactgtgtacaattcggatgtttactgacctcaaccttgtgcagaacttccagatgaaacatgaggttctttgcagatggattttaagtgttaagaagaattatcggaagaatgttgcctatcataattggagacatgcctttaatacagctcagtgcatgtttgctgctctaaaagcaggcaaaattcagaacaagctgactgacctggagatacttgcattgctgattgctgcactaagccacgatttggatcaccgtggtgtgaataactcttacatacagcgaagtgaacatccacttgcccagctttactgccattcaatcatggaacaccatcattttgaccagtgcctgatgattcttaatagtccaggcaatcagattctcagtggcctctccattgaagaatataagaccacgttgaaaataatcaagcaagctattttagctacagacctagcactgtacattaagaggcgaggagaatttggcgaacttataagaaaaaatcaattcaatttggaagatcctcatcaaaaggagttgtttttggcaatgctgatgacagcttgtgatctttctgcaattacaaaaccctggcctattcaacaacggatagcagaacttgtagcaactgaattttttgatcaaggagacagagagagaaaagaactcaacatagaacccactgatctaatgaacagggagaagaaaaacaaaatcccaagtatgcaagttgggttcatagatgccatctgcttgcaactgtatgaggccctgacccacgtgtcagaggactgtttccctttgctagatggctgcagaaagaacaggcagaaatggcaggcccttgcagaacagcag

SEQ ID NO: 8593 - DNA, 978 bp, Artificial Sequence
  source: /note="Description of Artificial Sequence: Synthetic Destabilizing Domain (DD)"
gaagaaacaagagagctacagtcgttagcggctgctgtggtgccatctgcccagacccttaaaattactgactttagcttcagtgactttgagctgtctgatctggaaacagcactgtgtacaattcggatgtttactgacctcaaccttgtgcagaacttccagatgaaacatgaggttctttgcagatggattttaagtgttaagaagaattatcggaagaatgttgcctatcataattggagacatgcctttaatacagctcagtgcatgtttgctgctctaaaagcaggcaaaattcagaacaagctgactgacctggagatacttgcattgctgattgctgcactaagccacgatttggatcaccgtggtgtgaataactcttacatacagcgaagtgaacatccacttgcccagctttactgccattcaatcatggaacaccatcattttgaccagtgcctgatgattcttaatagtccaggcaatcagattctcagtggcctctccattgaagaatataagaccacgttgaaaataatcaagcaagctattttagctacagacctagcactgtacattaagaggcgaggagaatttgcggaacttataagaaaaaatcaattcaatttggaagatcctcatcaaaaggagttgtttttggcaatgctgatgacagcttgtgatctttctgcaattacaaaaccctggcctattcaacaacggatagcagaacttgtagcaactgaattttttgatcaaggagacagagagagaaaagaactcaacatagaacccactgatctaatgaacagggagaagaaaaacaaaatcccaagtatgcaagttgggttcatagatgccatctgcttgcaactgtatgaggccctgacccacgtgtcagaggactgtttccctttgctagatggctgcagaaagaacaggcagaaatggcaggcccttgcagaacagcag

SEQ ID NO: 8594 - DNA, 978 bp, Artificial Sequence
  source: /note="Description of Artificial Sequence: Synthetic Destabilizing Domain (DD)"
gaagaaacaagagagctacagtcgttagcggctgctgtggtgccatctgcccagacccttaaaattactgactttagcttcagtgactttgagctgtctgatctggaaacagcactgtgtacaattcggatgtttactgacctcaaccttgtgcagaacttccagatgaaacatgaggttctttgcagatggattttaagtgttaagaagaattatcggaagaatgttgcctatcataattggagacatgcctttaatacagctcagtgcatgtttgctgctctaaaagcaggcaaaattcagaacaagctgactgacctggagatacttgcattgctgattgctgcactaagccacgatttggatcaccgtggtgtgaataactcttacatacagcgaagtgaacatccacttgcccagctttactgccattcaatcatggaacaccatcattttgaccagtgcctgatgattcttaatagtccaggcaatcagattctcagtggcctctccattgaagaatataagaccacgttgaaaataatcaagcaagctattttagctacagacctagcactgtacattaagaggcgaggagaatttctggaacttataagaaaaaatcaattcaatttggaagatcctcatcaaaaggagttgtttttggcaatgctgatgacagcttgtgatctttctgcaattacaaaaccctggcctattcaacaacggatagcagaacttgtagcaactgaattttttgatcaaggagacagagagagaaaagaactcaacatagaacccactgatctaatgaacagggagaagaaaaacaaaatcccaagtatgcaagttgggttcatagatgccatctgcttgcaactgtatgaggccctgacccacgtgtcagaggactgtttccctttgctagatggctgcagaaagaacaggcagaaatggcaggcccttgcagaacagcag

SEQ ID NO: 8595 - DNA, 978 bp, Artificial Sequence
  source: /note="Description of Artificial Sequence: Synthetic Destabilizing Domain (DD)"
gaagaaacaagagagctacagtcgttagcggctgctgtggtgccatctgcccagacccttaaaattactgactttagcttcagtgactttgagctgtctgatctggaaacagcactgtgtacaattcggatgtttactgacctcaaccttgtgcagaacttccagatgaaacatgaggttctttgcagatggattttaagtgttaagaagaattatcggaagaatgttgcctatcataattggagacatgcctttaatacagctcagtgcatgtttgctgctctaaaagcaggcaaaattcagaacaagctgactgacctggagatacttgcattgctgattgctgcactaagccacgatttggatcaccgtggtgtgaataactcttacatacagcgaagtgaacatccacttgcccagctttactgccattcaatcatggaacaccatcattttgaccagtgcctgatgattcttaatagtccaggcaatcagattctcagtggcctctccattgaagaatataagaccacgttgaaaataatcaagcaagctattttagctacagacctagcactgtacattaagaggcgaggagaatttatggaacttataagaaaaaatcaattcaatttggaagatcctcatcaaaaggagttgtttttggcaatgctgatgacagcttgtgatctttctgcaattacaaaaccctggcctattcaacaacggatagcagaacttgtagcaactgaattttttgatcaaggagacagagagagaaaagaactcaacatagaacccactgatctaatgaacagggagaagaaaaacaaaatcccaagtatgcaagttgggttcatagatgccatctgcttgcaactgtatgaggccctgacccacgtgtcagaggactgtttccctttgctagatggctgcagaaagaacaggcagaaatggcaggcccttgcagaacagcag

SEQ ID NO: 8596 - DNA, 978 bp, Artificial Sequence
  source: /note="Description of Artificial Sequence: Synthetic Destabilizing Domain (DD)"
gaagaaacaagagagctacagtcgttagcggctgctgtggtgccatctgcccagacccttaaaattactgactttagcttcagtgactttgagctgtctgatctggaaacagcactgtgtacaattcggatgtttactgacctcaaccttgtgcagaacttccagatgaaacatgaggttctttgcagatggattttaagtgttaagaagaattatcggaagaatgttgcctatcataattggagacatgcctttaatacagctcagtgcatgtttgctgctctaaaagcaggcaaaattcagaacaagctgactgacctggagatacttgcattgctgattgctgcactaagccacgatttggatcaccgtggtgtgaataactcttacatacagcgaagtgaacatccacttgcccagctttactgccattcaatcatggaacaccatcattttgaccagtgcctgatgattcttaatagtccaggcaatcagattctcagtggcctctccattgaagaatataagaccacgttgaaaataatcaagcaagctattttagctacagacctagcactgtacattaagaggcgaggagaatttcgtgaacttataagaaaaaatcaattcaatttggaagatcctcatcaaaaggagttgtttttggcaatgctgatgacagcttgtgatctttctgcaattacaaaaccctggcctattcaacaacggatagcagaacttgtagcaactgaattttttgatcaaggagacagagagagaaaagaactcaacatagaacccactgatctaatgaacagggagaagaaaaacaaaatcccaagtatgcaagttgggttcatagatgccatctgcttgcaactgtatgaggccctgacccacgtgtcagaggactgtttccctttgctagatggctgcagaaagaacaggcagaaatggcaggcccttgcagaacagcag

SEQ ID NO: 8597 - DNA, 978 bp, Artificial Sequence
  source: /note="Description of Artificial Sequence: Synthetic Destabilizing Domain (DD)"
gaagaaacaagagagctacagtcgttagcggctgctgtggtgccatctgcccagacccttaaaattactgactttagcttcagtgactttgagctgtctgatctggaaacagcactgtgtacaattcggatgtttactgacctcaaccttgtgcagaacttccagatgaaacatgaggttctttgcagatggattttaagtgttaagaagaattatcggaagaatgttgcctatcataattggagacatgcctttaatacagctcagtgcatgtttgctgctctaaaagcaggcaaaattcagaacaagctgactgacctggagatacttgcattgctgattgctgcactaagccacgatttggatcaccgtggtgtgaataactcttacatacagcgaagtgaacatccacttgcccagctttactgccattcaatcatggaacaccatcattttgaccagtgcctgatgattcttaatagtccaggcaatcagattctcagtggcctctccattgaagaatataagaccacgttgaaaataatcaagcaagctattttagctacagacctagcactgtacattaagaggcgaggagaattttgggaacttataagaaaaaatcaattcaatttggaagatcctcatcaaaaggagttgtttttggcaatgctgatgacagcttgtgatctttctgcaattacaaaaccctggcctattcaacaacggatagcagaacttgtagcaactgaattttttgatcaaggagacagagagagaaaagaactcaacatagaacccactgatctaatgaacagggagaagaaaaacaaaatcccaagtatgcaagttgggttcatagatgccatctgcttgcaactgtatgaggccctgacccacgtgtcagaggactgtttccctttgctagatggctgcagaaagaacaggcagaaatggcaggcccttgcagaacagcag

SEQ ID NO: 8598 - DNA, 978 bp, Artificial Sequence
  source: /note="Description of Artificial Sequence: Synthetic Destabilizing Domain (DD)"
gaagaaacaagagagctacagtcgttagcggctgctgtggtgccatctgcccagacccttaaaattactgactttagcttcagtgactttgagctgtctgatctggaaacagcactgtgtacaattcggatgtttactgacctcaaccttgtgcagaacttccagatgaaacatgaggttctttgcagatggattttaagtgttaagaagaattatcggaagaatgttgcctatcataattggagacatgcctttaatacagctcagtgcatgtttgctgctctaaaagcaggcaaaattcagaacaagctgactgacctggagatacttgcattgctgattgctgcactaagccacgatttggatcaccgtggtgtgaataactcttacatacagcgaagtgaacatccacttgcccagctttactgccattcaatcatggaacaccatcattttgaccagtgcctgatgattcttaatagtccaggcaatcagattctcagtggcctctccattgaagaatataagaccacgttgaaaataatcaagcaagctattttagctacagacctagcactgtacattaagaggcgaggagaatttaaagaacttataagaaaaaatcaattcaatttggaagatcctcatcaaaaggagttgtttttggcaatgctgatgacagcttgtgatctttctgcaattacaaaaccctggcctattcaacaacggatagcagaacttgtagcaactgaattttttgatcaaggagacagagagagaaaagaactcaacatagaacccactgatctaatgaacagggagaagaaaaacaaaatcccaagtatgcaagttgggttcatagatgccatctgcttgcaactgtatgaggccctgacccacgtgtcagaggactgtttccctttgctagatggctgcagaaagaacaggcagaaatggcaggcccttgcagaacagcag

SEQ ID NO: 8599 - DNA, 978 bp, Artificial Sequence
  source: /note="Description of Artificial Sequence: Synthetic Destabilizing Domain (DD)"
gaagaaacaagagagctacagtcgttagcggctgctgtggtgccatctgcccagacccttaaaattactgactttagcttcagtgactttgagctgtctgatctggaaacagcactgtgtacaattcggatgtttactgacctcaaccttgtgcagaacttccagatgaaacatgaggttctttgcagatggattttaagtgttaagaagaattatcggaagaatgttgcctatcataattggagacatgcctttaatacagctcagtgcatgtttgctgctctaaaagcaggcaaaattcagaacaagctgactgacctggagatacttgcattgctgattgctgcactaagccacgatttggatcaccgtggtgtgaataactcttacatacagcgaagtgaacatccacttgcccagctttactgccattcaatcatggaacaccatcattttgaccagtgcctgatgattcttaatagtccaggcaatcagattctcagtggcctctccattgaagaatataagaccacgttgaaaataatcaagcaagctattttagctacagacctagcactgtacattaagaggcgaggagaatttcaggaacttataagaaaaaatcaattcaatttggaagatcctcatcaaaaggagttgtttttggcaatgctgatgacagcttgtgatctttctgcaattacaaaaccctggcctattcaacaacggatagcagaacttgtagcaactgaattttttgatcaaggagacagagagagaaaagaactcaacatagaacccactgatctaatgaacagggagaagaaaaacaaaatcccaagtatgcaagttgggttcatagatgccatctgcttgcaactgtatgaggccctgacccacgtgtcagaggactgtttccctttgctagatggctgcagaaagaacaggcagaaatggcaggcccttgcagaacagcag

SEQ ID NO: 8600 - DNA, 978 bp, Artificial Sequence
  source: /note="Description of Artificial Sequence: Synthetic Destabilizing Domain (DD)"
gaagaaacaagagagctacagtcgttagcggctgctgtggtgccatctgcccagacccttaaaattactgactttagcttcagtgactttgagctgtctgatctggaaacagcactgtgtacaattcggatgtttactgacctcaaccttgtgcagaacttccagatgaaacatgaggttctttgcagatggattttaagtgttaagaagaattatcggaagaatgttgcctatcataattggagacatgcctttaatacagctcagtgcatgtttgctgctctaaaagcaggcaaaattcagaacaagctgactgacctggagatacttgcattgctgattgctgcactaagccacgatttggatcaccgtggtgtgaataactcttacatacagcgaagtgaacatccacttgcccagctttactgccattcaatcatggaacaccatcattttgaccagtgcctgatgattcttaatagtccaggcaatcagattctcagtggcctctccattgaagaatataagaccacgttgaaaataatcaagcaagctattttagctacagacctagcactgtacattaagaggcgaggagaatttgaagaacttataagaaaaaatcaattcaatttggaagatcctcatcaaaaggagttgtttttggcaatgctgatgacagcttgtgatctttctgcaattacaaaaccctggcctattcaacaacggatagcagaacttgtagcaactgaattttttgatcaaggagacagagagagaaaagaactcaacatagaacccactgatctaatgaacagggagaagaaaaacaaaatcccaagtatgcaagttgggttcatagatgccatctgcttgcaactgtatgaggccctgacccacgtgtcagaggactgtttccctttgctagatggctgcagaaagaacaggcagaaatggcaggcccttgcagaacagcag

SEQ ID NO: 8601 - DNA, 978 bp, Artificial Sequence
  source: /note="Description of Artificial Sequence: Synthetic Destabilizing Domain (DD)"
gaagaaacaagagagctacagtcgttagcggctgctgtggtgccatctgcccagacccttaaaattactgactttagcttcagtgactttgagctgtctgatctggaaacagcactgtgtacaattcggatgtttactgacctcaaccttgtgcagaacttccagatgaaacatgaggttctttgcagatggattttaagtgttaagaagaattatcggaagaatgttgcctatcataattggagacatgcctttaatacagctcagtgcatgtttgctgctctaaaagcaggcaaaattcagaacaagctgactgacctggagatacttgcattgctgattgctgcactaagccacgatttggatcaccgtggtgtgaataactcttacatacagcgaagtgaacatccacttgcccagctttactgccattcaatcatggaacaccatcattttgaccagtgcctgatgattcttaatagtccaggcaatcagattctcagtggcctctccattgaagaatataagaccacgttgaaaataatcaagcaagctattttagctacagacctagcactgtacattaagaggcgaggagaatttagcgaacttataagaaaaaatcaattcaatttggaagatcctcatcaaaaggagttgtttttggcaatgctgatgacagcttgtgatctttctgcaattacaaaaccctggcctattcaacaacggatagcagaacttgtagcaactgaattttttgatcaaggagacagagagagaaaagaactcaacatagaacccactgatctaatgaacagggagaagaaaaacaaaatcccaagtatgcaagttgggttcatagatgccatctgcttgcaactgtatgaggccctgacccacgtgtcagaggactgtttccctttgctagatggctgcagaaagaacaggcagaaatggcaggcccttgcagaacagcag

SEQ ID NO: 8602 - DNA, 978 bp, Artificial Sequence
  source: /note="Description of Artificial Sequence: Synthetic Destabilizing Domain (DD)"
gaagaaacaagagagctacagtcgttagcggctgctgtggtgccatctgcccagacccttaaaattactgactttagcttcagtgactttgagctgtctgatctggaaacagcactgtgtacaattcggatgtttactgacctcaaccttgtgcagaacttccagatgaaacatgaggttctttgcagatggattttaagtgttaagaagaattatcggaagaatgttgcctatcataattggagacatgcctttaatacagctcagtgcatgtttgctgctctaaaagcaggcaaaattcagaacaagctgactgacctggagatacttgcattgctgattgctgcactaagccacgatttggatcaccgtggtgtgaataactcttacatacagcgaagtgaacatccacttgcccagctttactgccattcaatcatggaacaccatcattttgaccagtgcctgatgattcttaatagtccaggcaatcagattctcagtggcctctccattgaagaatataagaccacgttgaaaataatcaagcaagctattttagctacagacctagcactgtacattaagaggcgaggagaatttccggaacttataagaaaaaatcaattcaatttggaagatcctcatcaaaaggagttgtttttggcaatgctgatgacagcttgtgatctttctgcaattacaaaaccctggcctattcaacaacggatagcagaacttgtagcaactgaattttttgatcaaggagacagagagagaaaagaactcaacatagaacccactgatctaatgaacagggagaagaaaaacaaaatcccaagtatgcaagttgggttcatagatgccatctgcttgcaactgtatgaggccctgacccacgtgtcagaggactgtttccctttgctagatggctgcagaaagaacaggcagaaatggcaggcccttgcagaacagcag

SEQ ID NO: 8603 - DNA, 978 bp, Artificial Sequence
  source: /note="Description of Artificial Sequence: Synthetic Destabilizing Domain (DD)"
gaagaaacaagagagctacagtcgttagcggctgctgtggtgccatctgcccagacccttaaaattactgactttagcttcagtgactttgagctgtctgatctggaaacagcactgtgtacaattcggatgtttactgacctcaaccttgtgcagaacttccagatgaaacatgaggttctttgcagatggattttaagtgttaagaagaattatcggaagaatgttgcctatcataattggagacatgcctttaatacagctcagtgcatgtttgctgctctaaaagcaggcaaaattcagaacaagctgactgacctggagatacttgcattgctgattgctgcactaagccacgatttggatcaccgtggtgtgaataactcttacatacagcgaagtgaacatccacttgcccagctttactgccattcaatcatggaacaccatcattttgaccagtgcctgatgattcttaatagtccaggcaatcagattctcagtggcctctccattgaagaatataagaccacgttgaaaataatcaagcaagctattttagctacagacctagcactgtacattaagaggcgaggagaatttgtggaacttataagaaaaaatcaattcaatttggaagatcctcatcaaaaggagttgtttttggcaatgctgatgacagcttgtgatctttctgcaattacaaaaccctggcctattcaacaacggatagcagaacttgtagcaactgaattttttgatcaaggagacagagagagaaaagaactcaacatagaacccactgatctaatgaacagggagaagaaaaacaaaatcccaagtatgcaagttgggttcatagatgccatctgcttgcaactgtatgaggccctgacccacgtgtcagaggactgtttccctttgctagatggctgcagaaagaacaggcagaaatggcaggcccttgcagaacagcag

SEQ ID NO: 8604 - DNA, 978 bp, Artificial Sequence
  source: /note="Description of Artificial Sequence: Synthetic Destabilizing Domain (DD)"
gaagaaacaagagagctacagtcgttagcggctgctgtggtgccatctgcccagacccttaaaattactgactttagcttcagtgactttgagctgtctgatctggaaacagcactgtgtacaattcggatgtttactgacctcaaccttgtgcagaacttccagatgaaacatgaggttctttgcagatggattttaagtgttaagaagaattatcggaagaatgttgcctatcataattggagacatgcctttaatacagctcagtgcatgtttgctgctctaaaagcaggcaaaattcagaacaagctgactgacctggagatacttgcattgctgattgctgcactaagccacgatttggatcaccgtggtgtgaataactcttacatacagcgaagtgaacatccacttgcccagctttactgccattcaatcatggaacaccatcattttgaccagtgcctgatgattcttaatagtccaggcaatcagattctcagtggcctctccattgaagaatataagaccacgttgaaaataatcaagcaagctattttagctacagacctagcactgtacattaagaggcgaggagaatttattgaacttataagaaaaaatcaattcaatttggaagatcctcatcaaaaggagttgtttttggcaatgctgatgacagcttgtgatctttctgcaattacaaaaccctggcctattcaacaacggatagcagaacttgtagcaactgaattttttgatcaaggagacagagagagaaaagaactcaacatagaacccactgatctaatgaacagggagaagaaaaacaaaatcccaagtatgcaagttgggttcatagatgccatctgcttgcaactgtatgaggccctgacccacgtgtcagaggactgtttccctttgctagatggctgcagaaagaacaggcagaaatggcaggcccttgcagaacagcag

SEQ ID NO: 8605 - DNA, 978 bp, Artificial Sequence
  source: /note="Description of Artificial Sequence: Synthetic Destabilizing Domain (DD)"
gaagaaacaagagagctacagtcgttagcggctgctgtggtgccatctgcccagacccttaaaattactgactttagcttcagtgactttgagctgtctgatctggaaacagcactgtgtacaattcggatgtttactgacctcaaccttgtgcagaacttccagatgaaacatgaggttctttgcagatggattttaagtgttaagaagaattatcggaagaatgttgcctatcataattggagacatgcctttaatacagctcagtgcatgtttgctgctctaaaagcaggcaaaattcagaacaagctgactgacctggagatacttgcattgctgattgctgcactaagccacgatttggatcaccgtggtgtgaataactcttacatacagcgaagtgaacatccacttgcccagctttactgccattcaatcatggaacaccatcattttgaccagtgcctgatgattcttaatagtccaggcaatcagattctcagtggcctctccattgaagaatataagaccacgttgaaaataatcaagcaagctattttagctacagacctagcactgtacattaagaggcgaggagaattttgcgaacttataagaaaaaatcaattcaatttggaagatcctcatcaaaaggagttgtttttggcaatgctgatgacagcttgtgatctttctgcaattacaaaaccctggcctattcaacaacggatagcagaacttgtagcaactgaattttttgatcaaggagacagagagagaaaagaactcaacatagaacccactgatctaatgaacagggagaagaaaaacaaaatcccaagtatgcaagttgggttcatagatgccatctgcttgcaactgtatgaggccctgacccacgtgtcagaggactgtttccctttgctagatggctgcagaaagaacaggcagaaatggcaggcccttgcagaacagcag

SEQ ID NO: 8606 - DNA, 978 bp, Artificial Sequence
  source: /note="Description of Artificial Sequence: Synthetic Destabilizing Domain (DD)"
gaagaaacaagagagctacagtcgttagcggctgctgtggtgccatctgcccagacccttaaaattactgactttagcttcagtgactttgagctgtctgatctggaaacagcactgtgtacaattcggatgtttactgacctcaaccttgtgcagaacttccagatgaaacatgaggttctttgcagatggattttaagtgttaagaagaattatcggaagaatgttgcctatcataattggagacatgcctttaatacagctcagtgcatgtttgctgctctaaaagcaggcaaaattcagaacaagctgactgacctggagatacttgcattgctgattgctgcactaagccacgatttggatcaccgtggtgtgaataactcttacatacagcgaagtgaacatccacttgcccagctttactgccattcaatcatggaacaccatcattttgaccagtgcctgatgattcttaatagtccaggcaatcagattctcagtggcctctccattgaagaatataagaccacgttgaaaataatcaagcaagctattttagctacagacctagcactgtacattaagaggcgaggagaattttatgaacttataagaaaaaatcaattcaatttggaagatcctcatcaaaaggagttgtttttggcaatgctgatgacagcttgtgatctttctgcaattacaaaaccctggcctattcaacaacggatagcagaacttgtagcaactgaattttttgatcaaggagacagagagagaaaagaactcaacatagaacccactgatctaatgaacagggagaagaaaaacaaaatcccaagtatgcaagttgggttcatagatgccatctgcttgcaactgtatgaggccctgacccacgtgtcagaggactgtttccctttgctagatggctgcagaaagaacaggcagaaatggcaggcccttgcagaacagcag

SEQ ID NO: 8607 - DNA, 978 bp, Artificial Sequence
  source: /note="Description of Artificial Sequence: Synthetic Destabilizing Domain (DD)"
gaagaaacaagagagctacagtcgttagcggctgctgtggtgccatctgcccagacccttaaaattactgactttagcttcagtgactttgagctgtctgatctggaaacagcactgtgtacaattcggatgtttactgacctcaaccttgtgcagaacttccagatgaaacatgaggttctttgcagatggattttaagtgttaagaagaattatcggaagaatgttgcctatcataattggagacatgcctttaatacagctcagtgcatgtttgctgctctaaaagcaggcaaaattcagaacaagctgactgacctggagatacttgcattgctgattgctgcactaagccacgatttggatcaccgtggtgtgaataactcttacatacagcgaagtgaacatccacttgcccagctttactgccattcaatcatggaacaccatcattttgaccagtgcctgatgattcttaatagtccaggcaatcagattctcagtggcctctccattgaagaatataagaccacgttgaaaataatcaagcaagctattttagctacagacctagcactgtacattaagaggcgaggagaatttcatgaacttataagaaaaaatcaattcaatttggaagatcctcatcaaaaggagttgtttttggcaatgctgatgacagcttgtgatctttctgcaattacaaaaccctggcctattcaacaacggatagcagaacttgtagcaactgaattttttgatcaaggagacagagagagaaaagaactcaacatagaacccactgatctaatgaacagggagaagaaaaacaaaatcccaagtatgcaagttgggttcatagatgccatctgcttgcaactgtatgaggccctgacccacgtgtcagaggactgtttccctttgctagatggctgcagaaagaacaggcagaaatggcaggcccttgcagaacagcag

SEQ ID NO: 8608 - DNA, 978 bp, Artificial Sequence
  source: /note="Description of Artificial Sequence: Synthetic Destabilizing Domain (DD)"
gaagaaacaagagagctacagtcgttagcggctgctgtggtgccatctgcccagacccttaaaattactgactttagcttcagtgactttgagctgtctgatctggaaacagcactgtgtacaattcggatgtttactgacctcaaccttgtgcagaacttccagatgaaacatgaggttctttgcagatggattttaagtgttaagaagaattatcggaagaatgttgcctatcataattggagacatgcctttaatacagctcagtgcatgtttgctgctctaaaagcaggcaaaattcagaacaagctgactgacctggagatacttgcattgctgattgctgcactaagccacgatttggatcaccgtggtgtgaataactcttacatacagcgaagtgaacatccacttgcccagctttactgccattcaatcatggaacaccatcattttgaccagtgcctgatgattcttaatagtccaggcaatcagattctcagtggcctctccattgaagaatataagaccacgttgaaaataatcaagcaagctattttagctacagacctagcactgtacattaagaggcgaggagaatttaacgaacttataagaaaaaatcaattcaatttggaagatcctcatcaaaaggagttgtttttggcaatgctgatgacagcttgtgatctttctgcaattacaaaaccctggcctattcaacaacggatagcagaacttgtagcaactgaattttttgatcaaggagacagagagagaaaagaactcaacatagaacccactgatctaatgaacagggagaagaaaaacaaaatcccaagtatgcaagttgggttcatagatgccatctgcttgcaactgtatgaggccctgacccacgtgtcagaggactgtttccctttgctagatggctgcagaaagaacaggcagaaatggcaggcccttgcagaacagcag

SEQ ID NO: 8609 - DNA, 978 bp, Artificial Sequence
  source: /note="Description of Artificial Sequence: Synthetic Destabilizing Domain (DD)"
gaagaaacaagagagctacagtcgttagcggctgctgtggtgccatctgcccagacccttaaaattactgactttagcttcagtgactttgagctgtctgatctggaaacagcactgtgtacaattcggatgtttactgacctcaaccttgtgcagaacttccagatgaaacatgaggttctttgcagatggattttaagtgttaagaagaattatcggaagaatgttgcctatcataattggagacatgcctttaatacagctcagtgcatgtttgctgctctaaaagcaggcaaaattcagaacaagctgactgacctggagatacttgcattgctgattgctgcactaagccacgatttggatcaccgtggtgtgaataactcttacatacagcgaagtgaacatccacttgcccagctttactgccattcaatcatggaacaccatcattttgaccagtgcctgatgattcttaatagtccaggcaatcagattctcagtggcctctccattgaagaatataagaccacgttgaaaataatcaagcaagctattttagctacagacctagcactgtacattaagaggcgaggagaatttgatgaacttataagaaaaaatcaattcaatttggaagatcctcatcaaaaggagttgtttttggcaatgctgatgacagcttgtgatctttctgcaattacaaaaccctggcctattcaacaacggatagcagaacttgtagcaactgaattttttgatcaaggagacagagagagaaaagaactcaacatagaacccactgatctaatgaacagggagaagaaaaacaaaatcccaagtatgcaagttgggttcatagatgccatctgcttgcaactgtatgaggccctgacccacgtgtcagaggactgtttccctttgctagatggctgcagaaagaacaggcagaaatggcaggcccttgcagaacagcag

SEQ ID NO: 8610 - DNA, 978 bp, Artificial Sequence
  source: /note="Description of Artificial Sequence: Synthetic Destabilizing Domain (DD)"
gaagaaacaagagagctacagtcgttagcggctgctgtggtgccatctgcccagacccttaaaattactgactttagcttcagtgactttgagctgtctgatctggaaacagcactgtgtacaattcggatgtttactgacctcaaccttgtgcagaacttccagatgaaacatgaggttctttgcagatggattttaagtgttaagaagaattatcggaagaatgttgcctatcataattggagacatgcctttaatacagctcagtgcatgtttgctgctctaaaagcaggcaaaattcagaacaagctgactgacctggagatacttgcattgctgattgctgcactaagccacgatttggatcaccgtggtgtgaataactcttacatacagcgaagtgaacatccacttgcccagctttactgccattcaatcatggaacaccatcattttgaccagtgcctgatgattcttaatagtccaggcaatcagattctcagtggcctctccattgaagaatataagaccacgttgaaaataatcaagcaagctattttagctacagacctagcactgtacattaagaggcgaggagaatttaccgaacttataagaaaaaatcaattcaatttggaagatcctcatcaaaaggagttgtttttggcaatgctgatgacagcttgtgatctttctgcaattacaaaaccctggcctattcaacaacggatagcagaacttgtagcaactgaattttttgatcaaggagacagagagagaaaagaactcaacatagaacccactgatctaatgaacagggagaagaaaaacaaaatcccaagtatgcaagttgggttcatagatgccatctgcttgcaactgtatgaggccctgacccacgtgtcagaggactgtttccctttgctagatggctgcagaaagaacaggcagaaatggcaggcccttgcagaacagcag

SEQ ID NO: 8611 - DNA, 1710 bp, Artificial Sequence
  source: /note="Description of Artificial Sequence: Synthetic polynucleotide"
atggtgagcaagggcgccgagctgttcaccggcatcgtgcccatcctgatcgagctgaatggcgatgtgaatggccacaagttcagcgtgagcggcgagggcgagggcgatgccacctacggcaagctgaccctgaagttcatctgcaccaccggcaagctgcctgtgccctggcccaccctggtgaccaccctgagctacggcgtgcagtgcttctcacgctaccccgatcacatgaagcagcacgacttcttcaagagcgccatgcctgagggctacatccaggagcgcaccatcttcttcgaggatgacggcaactacaagtcgcgcgccgaggtgaagttcgagggcgataccctggtgaatcgcatcgagctgaccggcaccgatttcaaggaggatggcaacatcctgggcaataagatggagtacaactacaacgcccacaatgtgtacatcatgaccgacaaggccaagaatggcatcaaggtgaacttcaagatccgccacaacatcgaggatggcagcgtgcagctggccgaccactaccagcagaatacccccatcggcgatggccctgtgctgctgcccgataaccactacctgtccacccagagcgccctgtccaaggaccccaacgagaagcgcgatcacatgatctacttcggcttcgtgaccgccgccgccatcacccacggcatggatgagctgtacaagggatccgaagaaacaagagagctacagtcgttagcggctgctgtggtgccatctgcccagacccttaaaattactgactttagcttcagtgactttgagctgtctgatctggaaacagcactgtgtacaattcggatgtttactgacctcaaccttgtgcagaacttccagatgaaacatgaggttctttgcagatggattttaagtgttaagaagaattatcggaagaatgttgcctatcataattggagacatgcctttaatacagctcagtgcatgtttgctgctctaaaagcaggcaaaattcagaacaagctgactgacctggagatacttgcattgctgattgctgcactaagccacgatttggatcaccgtggtgtgaataactcttacatacagcgaagtgaacatccacttgcccagctttactgccattcaatcatggaacaccatcattttgaccagtgcctgatgattcttaatagtccaggcaatcagattctcagtggcctctccattgaagaatataagaccacgttgaaaataatcaagcaagctattttagctacagacctagcactgtacattaagaggcgaggagaatttggcgaacttataagaaaaaatcaattcaatttggaagatcctcatcaaaaggagttgtttttggcaatgctgatgacagcttgtgatctttctgcaattacaaaaccctggcctattcaacaacggatagcagaacttgtagcaactgaattttttgatcaaggagacagagagagaaaagaactcaacatagaacccactgatctaatgaacagggagaagaaaaacaaaatcccaagtatgcaagttgggttcatagatgccatctgcttgcaactgtatgaggccctgacccacgtgtcagaggactgtttccctttgctagatggctgcagaaagaacaggcagaaatggcaggcccttgcagaacagcagtctagataa

SEQ ID NO: 8612 - DNA, 1710 bp, Artificial Sequence
  source: /note="Description of Artificial Sequence: Synthetic polynucleotide"
atggtgagcaagggcgccgagctgttcaccggcatcgtgcccatcctgatcgagctgaatggcgatgtgaatggccacaagttcagcgtgagcggcgagggcgagggcgatgccacctacggcaagctgaccctgaagttcatctgcaccaccggcaagctgcctgtgccctggcccaccctggtgaccaccctgagctacggcgtgcagtgcttctcacgctaccccgatcacatgaagcagcacgacttcttcaagagcgccatgcctgagggctacatccaggagcgcaccatcttcttcgaggatgacggcaactacaagtcgcgcgccgaggtgaagttcgagggcgataccctggtgaatcgcatcgagctgaccggcaccgatttcaaggaggatggcaacatcctgggcaataagatggagtacaactacaacgcccacaatgtgtacatcatgaccgacaaggccaagaatggcatcaaggtgaacttcaagatccgccacaacatcgaggatggcagcgtgcagctggccgaccactaccagcagaatacccccatcggcgatggccctgtgctgctgcccgataaccactacctgtccacccagagcgccctgtccaaggaccccaacgagaagcgcgatcacatgatctacttcggcttcgtgaccgccgccgccatcacccacggcatggatgagctgtacaagggatccgaagaaacaagagagctacagtcgttagcggctgctgtggtgccatctgcccagacccttaaaattactgactttagcttcagtgactttgagctgtctgatctggaaacagcactgtgtacaattcggatgtttactgacctcaaccttgtgcagaacttccagatgaaacatgaggttctttgcagatggattttaagtgttaagaagaattatcggaagaatgttgcctatcataattggagacatgcctttaatacagctcagtgcatgtttgctgctctaaaagcaggcaaaattcagaacaagctgactgacctggagatacttgcattgctgattgctgcactaagccacgatttggatcaccgtggtgtgaataactcttacatacagcgaagtgaacatccacttgcccagctttactgccattcaatcatggaacaccatcattttgaccagtgcctgatgattcttaatagtccaggcaatcagattctcagtggcctctccattgaagaatataagaccacgttgaaaataatcaagcaagctattttagctacagacctagcactgtacattaagaggcgaggagaatttgcggaacttataagaaaaaatcaattcaatttggaagatcctcatcaaaaggagttgtttttggcaatgctgatgacagcttgtgatctttctgcaattacaaaaccctggcctattcaacaacggatagcagaacttgtagcaactgaattttttgatcaaggagacagagagagaaaagaactcaacatagaacccactgatctaatgaacagggagaagaaaaacaaaatcccaagtatgcaagttgggttcatagatgccatctgcttgcaactgtatgaggccctgacccacgtgtcagaggactgtttccctttgctagatggctgcagaaagaacaggcagaaatggcaggcccttgcagaacagcagtctagataa

SEQ ID NO: 8613 - DNA, 1710 bp, Artificial Sequence
  source: /note="Description of Artificial Sequence: Synthetic polynucleotide"
atggtgagcaagggcgccgagctgttcaccggcatcgtgcccatcctgatcgagctgaatggcgatgtgaatggccacaagttcagcgtgagcggcgagggcgagggcgatgccacctacggcaagctgaccctgaagttcatctgcaccaccggcaagctgcctgtgccctggcccaccctggtgaccaccctgagctacggcgtgcagtgcttctcacgctaccccgatcacatgaagcagcacgacttcttcaagagcgccatgcctgagggctacatccaggagcgcaccatcttcttcgaggatgacggcaactacaagtcgcgcgccgaggtgaagttcgagggcgataccctggtgaatcgcatcgagctgaccggcaccgatttcaaggaggatggcaacatcctgggcaataagatggagtacaactacaacgcccacaatgtgtacatcatgaccgacaaggccaagaatggcatcaaggtgaacttcaagatccgccacaacatcgaggatggcagcgtgcagctggccgaccactaccagcagaatacccccatcggcgatggccctgtgctgctgcccgataaccactacctgtccacccagagcgccctgtccaaggaccccaacgagaagcgcgatcacatgatctacttcggcttcgtgaccgccgccgccatcacccacggcatggatgagctgtacaagggatccgaagaaacaagagagctacagtcgttagcggctgctgtggtgccatctgcccagacccttaaaattactgactttagcttcagtgactttgagctgtctgatctggaaacagcactgtgtacaattcggatgtttactgacctcaaccttgtgcagaacttccagatgaaacatgaggttctttgcagatggattttaagtgttaagaagaattatcggaagaatgttgcctatcataattggagacatgcctttaatacagctcagtgcatgtttgctgctctaaaagcaggcaaaattcagaacaagctgactgacctggagatacttgcattgctgattgctgcactaagccacgatttggatcaccgtggtgtgaataactcttacatacagcgaagtgaacatccacttgcccagctttactgccattcaatcatggaacaccatcattttgaccagtgcctgatgattcttaatagtccaggcaatcagattctcagtggcctctccattgaagaatataagaccacgttgaaaataatcaagcaagctattttagctacagacctagcactgtacattaagaggcgaggagaatttctggaacttataagaaaaaatcaattcaatttggaagatcctcatcaaaaggagttgtttttggcaatgctgatgacagcttgtgatctttctgcaattacaaaaccctggcctattcaacaacggatagcagaacttgtagcaactgaattttttgatcaaggagacagagagagaaaagaactcaacatagaacccactgatctaatgaacagggagaagaaaaacaaaatcccaagtatgcaagttgggttcatagatgccatctgcttgcaactgtatgaggccctgacccacgtgtcagaggactgtttccctttgctagatggctgcagaaagaacaggcagaaatggcaggcccttgcagaacagcagtctagataa

SEQ ID NO: 8614 - DNA, 1710 bp, Artificial Sequence
  source: /note="Description of Artificial Sequence: Synthetic polynucleotide"
atggtgagcaagggcgccgagctgttcaccggcatcgtgcccatcctgatcgagctgaatggcgatgtgaatggccacaagttcagcgtgagcggcgagggcgagggcgatgccacctacggcaagctgaccctgaagttcatctgcaccaccggcaagctgcctgtgccctggcccaccctggtgaccaccctgagctacggcgtgcagtgcttctcacgctaccccgatcacatgaagcagcacgacttcttcaagagcgccatgcctgagggctacatccaggagcgcaccatcttcttcgaggatgacggcaactacaagtcgcgcgccgaggtgaagttcgagggcgataccctggtgaatcgcatcgagctgaccggcaccgatttcaaggaggatggcaacatcctgggcaataagatggagtacaactacaacgcccacaatgtgtacatcatgaccgacaaggccaagaatggcatcaaggtgaacttcaagatccgccacaacatcgaggatggcagcgtgcagctggccgaccactaccagcagaatacccccatcggcgatggccctgtgctgctgcccgataaccactacctgtccacccagagcgccctgtccaaggaccccaacgagaagcgcgatcacatgatctacttcggcttcgtgaccgccgccgccatcacccacggcatggatgagctgtacaagggatccgaagaaacaagagagctacagtcgttagcggctgctgtggtgccatctgcccagacccttaaaattactgactttagcttcagtgactttgagctgtctgatctggaaacagcactgtgtacaattcggatgtttactgacctcaaccttgtgcagaacttccagatgaaacatgaggttctttgcagatggattttaagtgttaagaagaattatcggaagaatgttgcctatcataattggagacatgcctttaatacagctcagtgcatgtttgctgctctaaaagcaggcaaaattcagaacaagctgactgacctggagatacttgcattgctgattgctgcactaagccacgatttggatcaccgtggtgtgaataactcttacatacagcgaagtgaacatccacttgcccagctttactgccattcaatcatggaacaccatcattttgaccagtgcctgatgattcttaatagtccaggcaatcagattctcagtggcctctccattgaagaatataagaccacgttgaaaataatcaagcaagctattttagctacagacctagcactgtacattaagaggcgaggagaatttatggaacttataagaaaaaatcaattcaatttggaagatcctcatcaaaaggagttgtttttggcaatgctgatgacagcttgtgatctttctgcaattacaaaaccctggcctattcaacaacggatagcagaacttgtagcaactgaattttttgatcaaggagacagagagagaaaagaactcaacatagaacccactgatctaatgaacagggagaagaaaaacaaaatcccaagtatgcaagttgggttcatagatgccatctgcttgcaactgtatgaggccctgacccacgtgtcagaggactgtttccctttgctagatggctgcagaaagaacaggcagaaatggcaggcccttgcagaacagcagtctagataa

SEQ ID NO: 8615 - DNA, 1710 bp, Artificial Sequence
  source: /note="Description of Artificial Sequence: Synthetic polynucleotide"
atggtgagcaagggcgccgagctgttcaccggcatcgtgcccatcctgatcgagctgaatggcgatgtgaatggccacaagttcagcgtgagcggcgagggcgagggcgatgccacctacggcaagctgaccctgaagttcatctgcaccaccggcaagctgcctgtgccctggcccaccctggtgaccaccctgagctacggcgtgcagtgcttctcacgctaccccgatcacatgaagcagcacgacttcttcaagagcgccatgcctgagggctacatccaggagcgcaccatcttcttcgaggatgacggcaactacaagtcgcgcgccgaggtgaagttcgagggcgataccctggtgaatcgcatcgagctgaccggcaccgatttcaaggaggatggcaacatcctgggcaataagatggagtacaactacaacgcccacaatgtgtacatcatgaccgacaaggccaagaatggcatcaaggtgaacttcaagatccgccacaacatcgaggatggcagcgtgcagctggccgaccactaccagcagaatacccccatcggcgatggccctgtgctgctgcccgataaccactacctgtccacccagagcgccctgtccaaggaccccaacgagaagcgcgatcacatgatctacttcggcttcgtgaccgccgccgccatcacccacggcatggatgagctgtacaagggatccgaagaaacaagagagctacagtcgttagcggctgctgtggtgccatctgcccagacccttaaaattactgactttagcttcagtgactttgagctgtctgatctggaaacagcactgtgtacaattcggatgtttactgacctcaaccttgtgcagaacttccagatgaaacatgaggttctttgcagatggattttaagtgttaagaagaattatcggaagaatgttgcctatcataattggagacatgcctttaatacagctcagtgcatgtttgctgctctaaaagcaggcaaaattcagaacaagctgactgacctggagatacttgcattgctgattgctgcactaagccacgatttggatcaccgtggtgtgaataactcttacatacagcgaagtgaacatccacttgcccagctttactgccattcaatcatggaacaccatcattttgaccagtgcctgatgattcttaatagtccaggcaatcagattctcagtggcctctccattgaagaatataagaccacgttgaaaataatcaagcaagctattttagctacagacctagcactgtacattaagaggcgaggagaatttcgtgaacttataagaaaaaatcaattcaatttggaagatcctcatcaaaaggagttgtttttggcaatgctgatgacagcttgtgatctttctgcaattacaaaaccctggcctattcaacaacggatagcagaacttgtagcaactgaattttttgatcaaggagacagagagagaaaagaactcaacatagaacccactgatctaatgaacagggagaagaaaaacaaaatcccaagtatgcaagttgggttcatagatgccatctgcttgcaactgtatgaggccctgacccacgtgtcagaggactgtttccctttgctagatggctgcagaaagaacaggcagaaatggcaggcccttgcagaacagcagtctagataa

SEQ ID NO: 8616 - DNA, 1710 bp, Artificial Sequence
  source: /note="Description of Artificial Sequence: Synthetic polynucleotide"
atggtgagcaagggcgccgagctgttcaccggcatcgtgcccatcctgatcgagctgaatggcgatgtgaatggccacaagttcagcgtgagcggcgagggcgagggcgatgccacctacggcaagctgaccctgaagttcatctgcaccaccggcaagctgcctgtgccctggcccaccctggtgaccaccctgagctacggcgtgcagtgcttctcacgctaccccgatcacatgaagcagcacgacttcttcaagagcgccatgcctgagggctacatccaggagcgcaccatcttcttcgaggatgacggcaactacaagtcgcgcgccgaggtgaagttcgagggcgataccctggtgaatcgcatcgagctgaccggcaccgatttcaaggaggatggcaacatcctgggcaataagatggagtacaactacaacgcccacaatgtgtacatcatgaccgacaaggccaagaatggcatcaaggtgaacttcaagatccgccacaacatcgaggatggcagcgtgcagctggccgaccactaccagcagaatacccccatcggcgatggccctgtgctgctgcccgataaccactacctgtccacccagagcgccctgtccaaggaccccaacgagaagcgcgatcacatgatctacttcggcttcgtgaccgccgccgccatcacccacggcatggatgagctgtacaagggatccgaagaaacaagagagctacagtcgttagcggctgctgtggtgccatctgcccagacccttaaaattactgactttagcttcagtgactttgagctgtctgatctggaaacagcactgtgtacaattcggatgtttactgacctcaaccttgtgcagaacttccagatgaaacatgaggttctttgcagatggattttaagtgttaagaagaattatcggaagaatgttgcctatcataattggagacatgcctttaatacagctcagtgcatgtttgctgctctaaaagcaggcaaaattcagaacaagctgactgacctggagatacttgcattgctgattgctgcactaagccacgatttggatcaccgtggtgtgaataactcttacatacagcgaagtgaacatccacttgcccagctttactgccattcaatcatggaacaccatcattttgaccagtgcctgatgattcttaatagtccaggcaatcagattctcagtggcctctccattgaagaatataagaccacgttgaaaataatcaagcaagctattttagctacagacctagcactgtacattaagaggcgaggagaattttgggaacttataagaaaaaatcaattcaatttggaagatcctcatcaaaaggagttgtttttggcaatgctgatgacagcttgtgatctttctgcaattacaaaaccctggcctattcaacaacggatagcagaacttgtagcaactgaattttttgatcaaggagacagagagagaaaagaactcaacatagaacccactgatctaatgaacagggagaagaaaaacaaaatcccaagtatgcaagttgggttcatagatgccatctgcttgcaactgtatgaggccctgacccacgtgtcagaggactgtttccctttgctagatggctgcagaaagaacaggcagaaatggcaggcccttgcagaacagcagtctagataa

SEQ ID NO: 8617 - DNA, 1710 bp, Artificial Sequence
  source: /note="Description of Artificial Sequence: Synthetic polynucleotide"
atggtgagcaagggcgccgagctgttcaccggcatcgtgcccatcctgatcgagctgaatggcgatgtgaatggccacaagttcagcgtgagcggcgagggcgagggcgatgccacctacggcaagctgaccctgaagttcatctgcaccaccggcaagctgcctgtgccctggcccaccctggtgaccaccctgagctacggcgtgcagtgcttctcacgctaccccgatcacatgaagcagcacgacttcttcaagagcgccatgcctgagggctacatccaggagcgcaccatcttcttcgaggatgacggcaactacaagtcgcgcgccgaggtgaagttcgagggcgataccctggtgaatcgcatcgagctgaccggcaccgatttcaaggaggatggcaacatcctgggcaataagatggagtacaactacaacgcccacaatgtgtacatcatgaccgacaaggccaagaatggcatcaaggtgaacttcaagatccgccacaacatcgaggatggcagcgtgcagctggccgaccactaccagcagaatacccccatcggcgatggccctgtgctgctgcccgataaccactacctgtccacccagagcgccctgtccaaggaccccaacgagaagcgcgatcacatgatctacttcggcttcgtgaccgccgccgccatcacccacggcatggatgagctgtacaagggatccgaagaaacaagagagctacagtcgttagcggctgctgtggtgccatctgcccagacccttaaaattactgactttagcttcagtgactttgagctgtctgatctggaaacagcactgtgtacaattcggatgtttactgacctcaaccttgtgcagaacttccagatgaaacatgaggttctttgcagatggattttaagtgttaagaagaattatcggaagaatgttgcctatcataattggagacatgcctttaatacagctcagtgcatgtttgctgctctaaaagcaggcaaaattcagaacaagctgactgacctggagatacttgcattgctgattgctgcactaagccacgatttggatcaccgtggtgtgaataactcttacatacagcgaagtgaacatccacttgcccagctttactgccattcaatcatggaacaccatcattttgaccagtgcctgatgattcttaatagtccaggcaatcagattctcagtggcctctccattgaagaatataagaccacgttgaaaataatcaagcaagctattttagctacagacctagcactgtacattaagaggcgaggagaatttaaagaacttataagaaaaaatcaattcaatttggaagatcctcatcaaaaggagttgtttttggcaatgctgatgacagcttgtgatctttctgcaattacaaaaccctggcctattcaacaacggatagcagaacttgtagcaactgaattttttgatcaaggagacagagagagaaaagaactcaacatagaacccactgatctaatgaacagggagaagaaaaacaaaatcccaagtatgcaagttgggttcatagatgccatctgcttgcaactgtatgaggccctgacccacgtgtcagaggactgtttccctttgctagatggctgcagaaagaacaggcagaaatggcaggcccttgcagaacagcagtctagataa

SEQ ID NO: 8618 - DNA, 1710 bp, Artificial Sequence
  source: /note="Description of Artificial Sequence: Synthetic polynucleotide"
atggtgagcaagggcgccgagctgttcaccggcatcgtgcccatcctgatcgagctgaatggcgatgtgaatggccacaagttcagcgtgagcggcgagggcgagggcgatgccacctacggcaagctgaccctgaagttcatctgcaccaccggcaagctgcctgtgccctggcccaccctggtgaccaccctgagctacggcgtgcagtgcttctcacgctaccccgatcacatgaagcagcacgacttcttcaagagcgccatgcctgagggctacatccaggagcgcaccatcttcttcgaggatgacggcaactacaagtcgcgcgccgaggtgaagttcgagggcgataccctggtgaatcgcatcgagctgaccggcaccgatttcaaggaggatggcaacatcctgggcaataagatggagtacaactacaacgcccacaatgtgtacatcatgaccgacaaggccaagaatggcatcaaggtgaacttcaagatccgccacaacatcgaggatggcagcgtgcagctggccgaccactaccagcagaatacccccatcggcgatggccctgtgctgctgcccgataaccactacctgtccacccagagcgccctgtccaaggaccccaacgagaagcgcgatcacatgatctacttcggcttcgtgaccgccgccgccatcacccacggcatggatgagctgtacaagggatccgaagaaacaagagagctacagtcgttagcggctgctgtggtgccatctgcccagacccttaaaattactgactttagcttcagtgactttgagctgtctgatctggaaacagcactgtgtacaattcggatgtttactgacctcaaccttgtgcagaacttccagatgaaacatgaggttctttgcagatggattttaagtgttaagaagaattatcggaagaatgttgcctatcataattggagacatgcctttaatacagctcagtgcatgtttgctgctctaaaagcaggcaaaattcagaacaagctgactgacctggagatacttgcattgctgattgctgcactaagccacgatttggatcaccgtggtgtgaataactcttacatacagcgaagtgaacatccacttgcccagctttactgccattcaatcatggaacaccatcattttgaccagtgcctgatgattcttaatagtccaggcaatcagattctcagtggcctctccattgaagaatataagaccacgttgaaaataatcaagcaagctattttagctacagacctagcactgtacattaagaggcgaggagaatttcaggaacttataagaaaaaatcaattcaatttggaagatcctcatcaaaaggagttgtttttggcaatgctgatgacagcttgtgatctttctgcaattacaaaaccctggcctattcaacaacggatagcagaacttgtagcaactgaattttttgatcaaggagacagagagagaaaagaactcaacatagaacccactgatctaatgaacagggagaagaaaaacaaaatcccaagtatgcaagttgggttcatagatgccatctgcttgcaactgtatgaggccctgacccacgtgtcagaggactgtttccctttgctagatggctgcagaaagaacaggcagaaatggcaggcccttgcagaacagcagtctagataa

SEQ ID NO: 8619 - DNA, 1710 bp, Artificial Sequence
  source: /note="Description of Artificial Sequence: Synthetic polynucleotide"
atggtgagcaagggcgccgagctgttcaccggcatcgtgcccatcctgatcgagctgaatggcgatgtgaatggccacaagttcagcgtgagcggcgagggcgagggcgatgccacctacggcaagctgaccctgaagttcatctgcaccaccggcaagctgcctgtgccctggcccaccctggtgaccaccctgagctacggcgtgcagtgcttctcacgctaccccgatcacatgaagcagcacgacttcttcaagagcgccatgcctgagggctacatccaggagcgcaccatcttcttcgaggatgacggcaactacaagtcgcgcgccgaggtgaagttcgagggcgataccctggtgaatcgcatcgagctgaccggcaccgatttcaaggaggatggcaacatcctgggcaataagatggagtacaactacaacgcccacaatgtgtacatcatgaccgacaaggccaagaatggcatcaaggtgaacttcaagatccgccacaacatcgaggatggcagcgtgcagctggccgaccactaccagcagaatacccccatcggcgatggccctgtgctgctgcccgataaccactacctgtccacccagagcgccctgtccaaggaccccaacgagaagcgcgatcacatgatctacttcggcttcgtgaccgccgccgccatcacccacggcatggatgagctgtacaagggatccgaagaaacaagagagctacagtcgttagcggctgctgtggtgccatctgcccagacccttaaaattactgactttagcttcagtgactttgagctgtctgatctggaaacagcactgtgtacaattcggatgtttactgacctcaaccttgtgcagaacttccagatgaaacatgaggttctttgcagatggattttaagtgttaagaagaattatcggaagaatgttgcctatcataattggagacatgcctttaatacagctcagtgcatgtttgctgctctaaaagcaggcaaaattcagaacaagctgactgacctggagatacttgcattgctgattgctgcactaagccacgatttggatcaccgtggtgtgaataactcttacatacagcgaagtgaacatccacttgcccagctttactgccattcaatcatggaacaccatcattttgaccagtgcctgatgattcttaatagtccaggcaatcagattctcagtggcctctccattgaagaatataagaccacgttgaaaataatcaagcaagctattttagctacagacctagcactgtacattaagaggcgaggagaatttgaagaacttataagaaaaaatcaattcaatttggaagatcctcatcaaaaggagttgtttttggcaatgctgatgacagcttgtgatctttctgcaattacaaaaccctggcctattcaacaacggatagcagaacttgtagcaactgaattttttgatcaaggagacagagagagaaaagaactcaacatagaacccactgatctaatgaacagggagaagaaaaacaaaatcccaagtatgcaagttgggttcatagatgccatctgcttgcaactgtatgaggccctgacccacgtgtcagaggactgtttccctttgctagatggctgcagaaagaacaggcagaaatggcaggcccttgcagaacagcagtctagataa

SEQ ID NO: 8620 - DNA, 1710 bp, Artificial Sequence
  source: /note="Description of Artificial Sequence: Synthetic polynucleotide"
atggtgagcaagggcgccgagctgttcaccggcatcgtgcccatcctgatcgagctgaatggcgatgtgaatggccacaagttcagcgtgagcggcgagggcgagggcgatgccacctacggcaagctgaccctgaagttcatctgcaccaccggcaagctgcctgtgccctggcccaccctggtgaccaccctgagctacggcgtgcagtgcttctcacgctaccccgatcacatgaagcagcacgacttcttcaagagcgccatgcctgagggctacatccaggagcgcaccatcttcttcgaggatgacggcaactacaagtcgcgcgccgaggtgaagttcgagggcgataccctggtgaatcgcatcgagctgaccggcaccgatttcaaggaggatggcaacatcctgggcaataagatggagtacaactacaacgcccacaatgtgtacatcatgaccgacaaggccaagaatggcatcaaggtgaacttcaagatccgccacaacatcgaggatggcagcgtgcagctggccgaccactaccagcagaatacccccatcggcgatggccctgtgctgctgcccgataaccactacctgtccacccagagcgccctgtccaaggaccccaacgagaagcgcgatcacatgatctacttcggcttcgtgaccgccgccgccatcacccacggcatggatgagctgtacaagggatccgaagaaacaagagagctacagtcgttagcggctgctgtggtgccatctgcccagacccttaaaattactgactttagcttcagtgactttgagctgtctgatctggaaacagcactgtgtacaattcggatgtttactgacctcaaccttgtgcagaacttccagatgaaacatgaggttctttgcagatggattttaagtgttaagaagaattatcggaagaatgttgcctatcataattggagacatgcctttaatacagctcagtgcatgtttgctgctctaaaagcaggcaaaattcagaacaagctgactgacctggagatacttgcattgctgattgctgcactaagccacgatttggatcaccgtggtgtgaataactcttacatacagcgaagtgaacatccacttgcccagctttactgccattcaatcatggaacaccatcattttgaccagtgcctgatgattcttaatagtccaggcaatcagattctcagtggcctctccattgaagaatataagaccacgttgaaaataatcaagcaagctattttagctacagacctagcactgtacattaagaggcgaggagaatttagcgaacttataagaaaaaatcaattcaatttggaagatcctcatcaaaaggagttgtttttggcaatgctgatgacagcttgtgatctttctgcaattacaaaaccctggcctattcaacaacggatagcagaacttgtagcaactgaattttttgatcaaggagacagagagagaaaagaactcaacatagaacccactgatctaatgaacagggagaagaaaaacaaaatcccaagtatgcaagttgggttcatagatgccatctgcttgcaactgtatgaggccctgacccacgtgtcagaggactgtttccctttgctagatggctgcagaaagaacaggcagaaatggcaggcccttgcagaacagcagtctagataa

SEQ ID NO: 8621 - DNA, 1710 bp, Artificial Sequence
  source: /note="Description of Artificial Sequence: Synthetic polynucleotide"
atggtgagcaagggcgccgagctgttcaccggcatcgtgcccatcctgatcgagctgaatggcgatgtgaatggccacaagttcagcgtgagcggcgagggcgagggcgatgccacctacggcaagctgaccctgaagttcatctgcaccaccggcaagctgcctgtgccctggcccaccctggtgaccaccctgagctacggcgtgcagtgcttctcacgctaccccgatcacatgaagcagcacgacttcttcaagagcgccatgcctgagggctacatccaggagcgcaccatcttcttcgaggatgacggcaactacaagtcgcgcgccgaggtgaagttcgagggcgataccctggtgaatcgcatcgagctgaccggcaccgatttcaaggaggatggcaacatcctgggcaataagatggagtacaactacaacgcccacaatgtgtacatcatgaccgacaaggccaagaatggcatcaaggtgaacttcaagatccgccacaacatcgaggatggcagcgtgcagctggccgaccactaccagcagaatacccccatcggcgatggccctgtgctgctgcccgataaccactacctgtccacccagagcgccctgtccaaggaccccaacgagaagcgcgatcacatgatctacttcggcttcgtgaccgccgccgccatcacccacggcatggatgagctgtacaagggatccgaagaaacaagagagctacagtcgttagcggctgctgtggtgccatctgcccagacccttaaaattactgactttagcttcagtgactttgagctgtctgatctggaaacagcactgtgtacaattcggatgtttactgacctcaaccttgtgcagaacttccagatgaaacatgaggttctttgcagatggattttaagtgttaagaagaattatcggaagaatgttgcctatcataattggagacatgcctttaatacagctcagtgcatgtttgctgctctaaaagcaggcaaaattcagaacaagctgactgacctggagatacttgcattgctgattgctgcactaagccacgatttggatcaccgtggtgtgaataactcttacatacagcgaagtgaacatccacttgcccagctttactgccattcaatcatggaacaccatcattttgaccagtgcctgatgattcttaatagtccaggcaatcagattctcagtggcctctccattgaagaatataagaccacgttgaaaataatcaagcaagctattttagctacagacctagcactgtacattaagaggcgaggagaatttccggaacttataagaaaaaatcaattcaatttggaagatcctcatcaaaaggagttgtttttggcaatgctgatgacagcttgtgatctttctgcaattacaaaaccctggcctattcaacaacggatagcagaacttgtagcaactgaattttttgatcaaggagacagagagagaaaagaactcaacatagaacccactgatctaatgaacagggagaagaaaaacaaaatcccaagtatgcaagttgggttcatagatgccatctgcttgcaactgtatgaggccctgacccacgtgtcagaggactgtttccctttgctagatggctgcagaaagaacaggcagaaatggcaggcccttgcagaacagcagtctagataa

SEQ ID NO: 8622 - DNA, 1710 bp, Artificial Sequence
  source: /note="Description of Artificial Sequence: Synthetic polynucleotide"
atggtgagcaagggcgccgagctgttcaccggcatcgtgcccatcctgatcgagctgaatggcgatgtgaatggccacaagttcagcgtgagcggcgagggcgagggcgatgccacctacggcaagctgaccctgaagttcatctgcaccaccggcaagctgcctgtgccctggcccaccctggtgaccaccctgagctacggcgtgcagtgcttctcacgctaccccgatcacatgaagcagcacgacttcttcaagagcgccatgcctgagggctacatccaggagcgcaccatcttcttcgaggatgacggcaactacaagtcgcgcgccgaggtgaagttcgagggcgataccctggtgaatcgcatcgagctgaccggcaccgatttcaaggaggatggcaacatcctgggcaataagatggagtacaactacaacgcccacaatgtgtacatcatgaccgacaaggccaagaatggcatcaaggtgaacttcaagatccgccacaacatcgaggatggcagcgtgcagctggccgaccactaccagcagaatacccccatcggcgatggccctgtgctgctgcccgataaccactacctgtccacccagagcgccctgtccaaggaccccaacgagaagcgcgatcacatgatctacttcggcttcgtgaccgccgccgccatcacccacggcatggatgagctgtacaagggatccgaagaaacaagagagctacagtcgttagcggctgctgtggtgccatctgcccagacccttaaaattactgactttagcttcagtgactttgagctgtctgatctggaaacagcactgtgtacaattcggatgtttactgacctcaaccttgtgcagaacttccagatgaaacatgaggttctttgcagatggattttaagtgttaagaagaattatcggaagaatgttgcctatcataattggagacatgcctttaatacagctcagtgcatgtttgctgctctaaaagcaggcaaaattcagaacaagctgactgacctggagatacttgcattgctgattgctgcactaagccacgatttggatcaccgtggtgtgaataactcttacatacagcgaagtgaacatccacttgcccagctttactgccattcaatcatggaacaccatcattttgaccagtgcctgatgattcttaatagtccaggcaatcagattctcagtggcctctccattgaagaatataagaccacgttgaaaataatcaagcaagctattttagctacagacctagcactgtacattaagaggcgaggagaatttgtggaacttataagaaaaaatcaattcaatttggaagatcctcatcaaaaggagttgtttttggcaatgctgatgacagcttgtgatctttctgcaattacaaaaccctggcctattcaacaacggatagcagaacttgtagcaactgaattttttgatcaaggagacagagagagaaaagaactcaacatagaacccactgatctaatgaacagggagaagaaaaacaaaatcccaagtatgcaagttgggttcatagatgccatctgcttgcaactgtatgaggccctgacccacgtgtcagaggactgtttccctttgctagatggctgcagaaagaacaggcagaaatggcaggcccttgcagaacagcagtctagataa

SEQ ID NO: 8623 - DNA, 1710 bp, Artificial Sequence
  source: /note="Description of Artificial Sequence: Synthetic polynucleotide"
atggtgagcaagggcgccgagctgttcaccggcatcgtgcccatcctgatcgagctgaatggcgatgtgaatggccacaagttcagcgtgagcggcgagggcgagggcgatgccacctacggcaagctgaccctgaagttcatctgcaccaccggcaagctgcctgtgccctggcccaccctggtgaccaccctgagctacggcgtgcagtgcttctcacgctaccccgatcacatgaagcagcacgacttcttcaagagcgccatgcctgagggctacatccaggagcgcaccatcttcttcgaggatgacggcaactacaagtcgcgcgccgaggtgaagttcgagggcgataccctggtgaatcgcatcgagctgaccggcaccgatttcaaggaggatggcaacatcctgggcaataagatggagtacaactacaacgcccacaatgtgtacatcatgaccgacaaggccaagaatggcatcaaggtgaacttcaagatccgccacaacatcgaggatggcagcgtgcagctggccgaccactaccagcagaatacccccatcggcgatggccctgtgctgctgcccgataaccactacctgtccacccagagcgccctgtccaaggaccccaacgagaagcgcgatcacatgatctacttcggcttcgtgaccgccgccgccatcacccacggcatggatgagctgtacaagggatccgaagaaacaagagagctacagtcgttagcggctgctgtggtgccatctgcccagacccttaaaattactgactttagcttcagtgactttgagctgtctgatctggaaacagcactgtgtacaattcggatgtttactgacctcaaccttgtgcagaacttccagatgaaacatgaggttctttgcagatggattttaagtgttaagaagaattatcggaagaatgttgcctatcataattggagacatgcctttaatacagctcagtgcatgtttgctgctctaaaagcaggcaaaattcagaacaagctgactgacctggagatacttgcattgctgattgctgcactaagccacgatttggatcaccgtggtgtgaataactcttacatacagcgaagtgaacatccacttgcccagctttactgccattcaatcatggaacaccatcattttgaccagtgcctgatgattcttaatagtccaggcaatcagattctcagtggcctctccattgaagaatataagaccacgttgaaaataatcaagcaagctattttagctacagacctagcactgtacattaagaggcgaggagaatttattgaacttataagaaaaaatcaattcaatttggaagatcctcatcaaaaggagttgtttttggcaatgctgatgacagcttgtgatctttctgcaattacaaaaccctggcctattcaacaacggatagcagaacttgtagcaactgaattttttgatcaaggagacagagagagaaaagaactcaacatagaacccactgatctaatgaacagggagaagaaaaacaaaatcccaagtatgcaagttgggttcatagatgccatctgcttgcaactgtatgaggccctgacccacgtgtcagaggactgtttccctttgctagatggctgcagaaagaacaggcagaaatggcaggcccttgcagaacagcagtctagataa

SEQ ID NO: 8624 - DNA, 1710 bp, Artificial Sequence
  source: /note="Description of Artificial Sequence: Synthetic polynucleotide"
atggtgagcaagggcgccgagctgttcaccggcatcgtgcccatcctgatcgagctgaatggcgatgtgaatggccacaagttcagcgtgagcggcgagggcgagggcgatgccacctacggcaagctgaccctgaagttcatctgcaccaccggcaagctgcctgtgccctggcccaccctggtgaccaccctgagctacggcgtgcagtgcttctcacgctaccccgatcacatgaagcagcacgacttcttcaagagcgccatgcctgagggctacatccaggagcgcaccatcttcttcgaggatgacggcaactacaagtcgcgcgccgaggtgaagttcgagggcgataccctggtgaatcgcatcgagctgaccggcaccgatttcaaggaggatggcaacatcctgggcaataagatggagtacaactacaacgcccacaatgtgtacatcatgaccgacaaggccaagaatggcatcaaggtgaacttcaagatccgccacaacatcgaggatggcagcgtgcagctggccgaccactaccagcagaatacccccatcggcgatggccctgtgctgctgcccgataaccactacctgtccacccagagcgccctgtccaaggaccccaacgagaagcgcgatcacatgatctacttcggcttcgtgaccgccgccgccatcacccacggcatggatgagctgtacaagggatccgaagaaacaagagagctacagtcgttagcggctgctgtggtgccatctgcccagacccttaaaattactgactttagcttcagtgactttgagctgtctgatctggaaacagcactgtgtacaattcggatgtttactgacctcaaccttgtgcagaacttccagatgaaacatgaggttctttgcagatggattttaagtgttaagaagaattatcggaagaatgttgcctatcataattggagacatgcctttaatacagctcagtgcatgtttgctgctctaaaagcaggcaaaattcagaacaagctgactgacctggagatacttgcattgctgattgctgcactaagccacgatttggatcaccgtggtgtgaataactcttacatacagcgaagtgaacatccacttgcccagctttactgccattcaatcatggaacaccatcattttgaccagtgcctgatgattcttaatagtccaggcaatcagattctcagtggcctctccattgaagaatataagaccacgttgaaaataatcaagcaagctattttagctacagacctagcactgtacattaagaggcgaggagaattttgcgaacttataagaaaaaatcaattcaatttggaagatcctcatcaaaaggagttgtttttggcaatgctgatgacagcttgtgatctttctgcaattacaaaaccctggcctattcaacaacggatagcagaacttgtagcaactgaattttttgatcaaggagacagagagagaaaagaactcaacatagaacccactgatctaatgaacagggagaagaaaaacaaaatcccaagtatgcaagttgggttcatagatgccatctgcttgcaactgtatgaggccctgacccacgtgtcagaggactgtttccctttgctagatggctgcagaaagaacaggcagaaatggcaggcccttgcagaacagcagtctagataa

SEQ ID NO: 8625 - DNA, 1710 bp, Artificial Sequence
  source: /note="Description of Artificial Sequence: Synthetic polynucleotide"
atggtgagcaagggcgccgagctgttcaccggcatcgtgcccatcctgatcgagctgaatggcgatgtgaatggccacaagttcagcgtgagcggcgagggcgagggcgatgccacctacggcaagctgaccctgaagttcatctgcaccaccggcaagctgcctgtgccctggcccaccctggtgaccaccctgagctacggcgtgcagtgcttctcacgctaccccgatcacatgaagcagcacgacttcttcaagagcgccatgcctgagggctacatccaggagcgcaccatcttcttcgaggatgacggcaactacaagtcgcgcgccgaggtgaagttcgagggcgataccctggtgaatcgcatcgagctgaccggcaccgatttcaaggaggatggcaacatcctgggcaataagatggagtacaactacaacgcccacaatgtgtacatcatgaccgacaaggccaagaatggcatcaaggtgaacttcaagatccgccacaacatcgaggatggcagcgtgcagctggccgaccactaccagcagaatacccccatcggcgatggccctgtgctgctgcccgataaccactacctgtccacccagagcgccctgtccaaggaccccaacgagaagcgcgatcacatgatctacttcggcttcgtgaccgccgccgccatcacccacggcatggatgagctgtacaagggatccgaagaaacaagagagctacagtcgttagcggctgctgtggtgccatctgcccagacccttaaaattactgactttagcttcagtgactttgagctgtctgatctggaaacagcactgtgtacaattcggatgtttactgacctcaaccttgtgcagaacttccagatgaaacatgaggttctttgcagatggattttaagtgttaagaagaattatcggaagaatgttgcctatcataattggagacatgcctttaatacagctcagtgcatgtttgctgctctaaaagcaggcaaaattcagaacaagctgactgacctggagatacttgcattgctgattgctgcactaagccacgatttggatcaccgtggtgtgaataactcttacatacagcgaagtgaacatccacttgcccagctttactgccattcaatcatggaacaccatcattttgaccagtgcctgatgattcttaatagtccaggcaatcagattctcagtggcctctccattgaagaatataagaccacgttgaaaataatcaagcaagctattttagctacagacctagcactgtacattaagaggcgaggagaattttatgaacttataagaaaaaatcaattcaatttggaagatcctcatcaaaaggagttgtttttggcaatgctgatgacagcttgtgatctttctgcaattacaaaaccctggcctattcaacaacggatagcagaacttgtagcaactgaattttttgatcaaggagacagagagagaaaagaactcaacatagaacccactgatctaatgaacagggagaagaaaaacaaaatcccaagtatgcaagttgggttcatagatgccatctgcttgcaactgtatgaggccctgacccacgtgtcagaggactgtttccctttgctagatggctgcagaaagaacaggcagaaatggcaggcccttgcagaacagcagtctagataa

SEQ ID NO: 8626 - DNA, 1710 bp, Artificial Sequence
  source: /note="Description of Artificial Sequence: Synthetic polynucleotide"
atggtgagcaagggcgccgagctgttcaccggcatcgtgcccatcctgatcgagctgaatggcgatgtgaatggccacaagttcagcgtgagcggcgagggcgagggcgatgccacctacggcaagctgaccctgaagttcatctgcaccaccggcaagctgcctgtgccctggcccaccctggtgaccaccctgagctacggcgtgcagtgcttctcacgctaccccgatcacatgaagcagcacgacttcttcaagagcgccatgcctgagggctacatccaggagcgcaccatcttcttcgaggatgacggcaactacaagtcgcgcgccgaggtgaagttcgagggcgataccctggtgaatcgcatcgagctgaccggcaccgatttcaaggaggatggcaacatcctgggcaataagatggagtacaactacaacgcccacaatgtgtacatcatgaccgacaaggccaagaatggcatcaaggtgaacttcaagatccgccacaacatcgaggatggcagcgtgcagctggccgaccactaccagcagaatacccccatcggcgatggccctgtgctgctgcccgataaccactacctgtccacccagagcgccctgtccaaggaccccaacgagaagcgcgatcacatgatctacttcggcttcgtgaccgccgccgccatcacccacggcatggatgagctgtacaagggatccgaagaaacaagagagctacagtcgttagcggctgctgtggtgccatctgcccagacccttaaaattactgactttagcttcagtgactttgagctgtctgatctggaaacagcactgtgtacaattcggatgtttactgacctcaaccttgtgcagaacttccagatgaaacatgaggttctttgcagatggattttaagtgttaagaagaattatcggaagaatgttgcctatcataattggagacatgcctttaatacagctcagtgcatgtttgctgctctaaaagcaggcaaaattcagaacaagctgactgacctggagatacttgcattgctgattgctgcactaagccacgatttggatcaccgtggtgtgaataactcttacatacagcgaagtgaacatccacttgcccagctttactgccattcaatcatggaacaccatcattttgaccagtgcctgatgattcttaatagtccaggcaatcagattctcagtggcctctccattgaagaatataagaccacgttgaaaataatcaagcaagctattttagctacagacctagcactgtacattaagaggcgaggagaatttcatgaacttataagaaaaaatcaattcaatttggaagatcctcatcaaaaggagttgtttttggcaatgctgatgacagcttgtgatctttctgcaattacaaaaccctggcctattcaacaacggatagcagaacttgtagcaactgaattttttgatcaaggagacagagagagaaaagaactcaacatagaacccactgatctaatgaacagggagaagaaaaacaaaatcccaagtatgcaagttgggttcatagatgccatctgcttgcaactgtatgaggccctgacccacgtgtcagaggactgtttccctttgctagatggctgcagaaagaacaggcagaaatggcaggcccttgcagaacagcagtctagataa

SEQ ID NO: 8627 - DNA, 1710 bp, Artificial Sequence
  source: /note="Description of Artificial Sequence: Synthetic polynucleotide"
atggtgagcaagggcgccgagctgttcaccggcatcgtgcccatcctgatcgagctgaatggcgatgtgaatggccacaagttcagcgtgagcggcgagggcgagggcgatgccacctacggcaagctgaccctgaagttcatctgcaccaccggcaagctgcctgtgccctggcccaccctggtgaccaccctgagctacggcgtgcagtgcttctcacgctaccccgatcacatgaagcagcacgacttcttcaagagcgccatgcctgagggctacatccaggagcgcaccatcttcttcgaggatgacggcaactacaagtcgcgcgccgaggtgaagttcgagggcgataccctggtgaatcgcatcgagctgaccggcaccgatttcaaggaggatggcaacatcctgggcaataagatggagtacaactacaacgcccacaatgtgtacatcatgaccgacaaggccaagaatggcatcaaggtgaacttcaagatccgccacaacatcgaggatggcagcgtgcagctggccgaccactaccagcagaatacccccatcggcgatggccctgtgctgctgcccgataaccactacctgtccacccagagcgccctgtccaaggaccccaacgagaagcgcgatcacatgatctacttcggcttcgtgaccgccgccgccatcacccacggcatggatgagctgtacaagggatccgaagaaacaagagagctacagtcgttagcggctgctgtggtgccatctgcccagacccttaaaattactgactttagcttcagtgactttgagctgtctgatctggaaacagcactgtgtacaattcggatgtttactgacctcaaccttgtgcagaacttccagatgaaacatgaggttctttgcagatggattttaagtgttaagaagaattatcggaagaatgttgcctatcataattggagacatgcctttaatacagctcagtgcatgtttgctgctctaaaagcaggcaaaattcagaacaagctgactgacctggagatacttgcattgctgattgctgcactaagccacgatttggatcaccgtggtgtgaataactcttacatacagcgaagtgaacatccacttgcccagctttactgccattcaatcatggaacaccatcattttgaccagtgcctgatgattcttaatagtccaggcaatcagattctcagtggcctctccattgaagaatataagaccacgttgaaaataatcaagcaagctattttagctacagacctagcactgtacattaagaggcgaggagaatttaacgaacttataagaaaaaatcaattcaatttggaagatcctcatcaaaaggagttgtttttggcaatgctgatgacagcttgtgatctttctgcaattacaaaaccctggcctattcaacaacggatagcagaacttgtagcaactgaattttttgatcaaggagacagagagagaaaagaactcaacatagaacccactgatctaatgaacagggagaagaaaaacaaaatcccaagtatgcaagttgggttcatagatgccatctgcttgcaactgtatgaggccctgacccacgtgtcagaggactgtttccctttgctagatggctgcagaaagaacaggcagaaatggcaggcccttgcagaacagcagtctagataa

SEQ ID NO: 8628 - DNA, 1710 bp, Artificial Sequence
  source: /note="Description of Artificial Sequence: Synthetic polynucleotide"
atggtgagcaagggcgccgagctgttcaccggcatcgtgcccatcctgatcgagctgaatggcgatgtgaatggccacaagttcagcgtgagcggcgagggcgagggcgatgccacctacggcaagctgaccctgaagttcatctgcaccaccggcaagctgcctgtgccctggcccaccctggtgaccaccctgagctacggcgtgcagtgcttctcacgctaccccgatcacatgaagcagcacgacttcttcaagagcgccatgcctgagggctacatccaggagcgcaccatcttcttcgaggatgacggcaactacaagtcgcgcgccgaggtgaagttcgagggcgataccctggtgaatcgcatcgagctgaccggcaccgatttcaaggaggatggcaacatcctgggcaataagatggagtacaactacaacgcccacaatgtgtacatcatgaccgacaaggccaagaatggcatcaaggtgaacttcaagatccgccacaacatcgaggatggcagcgtgcagctggccgaccactaccagcagaatacccccatcggcgatggccctgtgctgctgcccgataaccactacctgtccacccagagcgccctgtccaaggaccccaacgagaagcgcgatcacatgatctacttcggcttcgtgaccgccgccgccatcacccacggcatggatgagctgtacaagggatccgaagaaacaagagagctacagtcgttagcggctgctgtggtgccatctgcccagacccttaaaattactgactttagcttcagtgactttgagctgtctgatctggaaacagcactgtgtacaattcggatgtttactgacctcaaccttgtgcagaacttccagatgaaacatgaggttctttgcagatggattttaagtgttaagaagaattatcggaagaatgttgcctatcataattggagacatgcctttaatacagctcagtgcatgtttgctgctctaaaagcaggcaaaattcagaacaagctgactgacctggagatacttgcattgctgattgctgcactaagccacgatttggatcaccgtggtgtgaataactcttacatacagcgaagtgaacatccacttgcccagctttactgccattcaatcatggaacaccatcattttgaccagtgcctgatgattcttaatagtccaggcaatcagattctcagtggcctctccattgaagaatataagaccacgttgaaaataatcaagcaagctattttagctacagacctagcactgtacattaagaggcgaggagaatttgatgaacttataagaaaaaatcaattcaatttggaagatcctcatcaaaaggagttgtttttggcaatgctgatgacagcttgtgatctttctgcaattacaaaaccctggcctattcaacaacggatagcagaacttgtagcaactgaattttttgatcaaggagacagagagagaaaagaactcaacatagaacccactgatctaatgaacagggagaagaaaaacaaaatcccaagtatgcaagttgggttcatagatgccatctgcttgcaactgtatgaggccctgacccacgtgtcagaggactgtttccctttgctagatggctgcagaaagaacaggcagaaatggcaggcccttgcagaacagcagtctagataa

SEQ ID NO: 8629 - DNA, 1710 bp, Artificial Sequence
  source: /note="Description of Artificial Sequence: Synthetic polynucleotide"
atggtgagcaagggcgccgagctgttcaccggcatcgtgcccatcctgatcgagctgaatggcgatgtgaatggccacaagttcagcgtgagcggcgagggcgagggcgatgccacctacggcaagctgaccctgaagttcatctgcaccaccggcaagctgcctgtgccctggcccaccctggtgaccaccctgagctacggcgtgcagtgcttctcacgctaccccgatcacatgaagcagcacgacttcttcaagagcgccatgcctgagggctacatccaggagcgcaccatcttcttcgaggatgacggcaactacaagtcgcgcgccgaggtgaagttcgagggcgataccctggtgaatcgcatcgagctgaccggcaccgatttcaaggaggatggcaacatcctgggcaataagatggagtacaactacaacgcccacaatgtgtacatcatgaccgacaaggccaagaatggcatcaaggtgaacttcaagatccgccacaacatcgaggatggcagcgtgcagctggccgaccactaccagcagaatacccccatcggcgatggccctgtgctgctgcccgataaccactacctgtccacccagagcgccctgtccaaggaccccaacgagaagcgcgatcacatgatctacttcggcttcgtgaccgccgccgccatcacccacggcatggatgagctgtacaagggatccgaagaaacaagagagctacagtcgttagcggctgctgtggtgccatctgcccagacccttaaaattactgactttagcttcagtgactttgagctgtctgatctggaaacagcactgtgtacaattcggatgtttactgacctcaaccttgtgcagaacttccagatgaaacatgaggttctttgcagatggattttaagtgttaagaagaattatcggaagaatgttgcctatcataattggagacatgcctttaatacagctcagtgcatgtttgctgctctaaaagcaggcaaaattcagaacaagctgactgacctggagatacttgcattgctgattgctgcactaagccacgatttggatcaccgtggtgtgaataactcttacatacagcgaagtgaacatccacttgcccagctttactgccattcaatcatggaacaccatcattttgaccagtgcctgatgattcttaatagtccaggcaatcagattctcagtggcctctccattgaagaatataagaccacgttgaaaataatcaagcaagctattttagctacagacctagcactgtacattaagaggcgaggagaatttaccgaacttataagaaaaaatcaattcaatttggaagatcctcatcaaaaggagttgtttttggcaatgctgatgacagcttgtgatctttctgcaattacaaaaccctggcctattcaacaacggatagcagaacttgtagcaactgaattttttgatcaaggagacagagagagaaaagaactcaacatagaacccactgatctaatgaacagggagaagaaaaacaaaatcccaagtatgcaagttgggttcatagatgccatctgcttgcaactgtatgaggccctgacccacgtgtcagaggactgtttccctttgctagatggctgcagaaagaacaggcagaaatggcaggcccttgcagaacagcagtctagataa

SEQ ID NO: 8630 - protein, 6 aa, Artificial Sequence
  source: /note="Description of Artificial Sequence: Synthetic Linker"
GGSGGG

SEQ ID NO: 8631 - DNA, 18 bp, Artificial Sequence
  source: /note="Description of Artificial Sequence: Synthetic Linker"
ggaggtagtggtggaggc

SEQ ID NO: 8632 - protein, 326 aa, Artificial Sequence
  source: /note="Description of Artificial Sequence: Synthetic Destabilizing Domain (DD)"
EETRELQSLAAAVVPSAQTLKITDFSFSDFELSDLETALCTIRMFTDLNLVQNFQMKHEVLCRWILSVKKNYRKNVAYHNWRHAFNTAQCMFAALKAGKIQNKLTDLEILALLIAALSHDLDHRGVNNSYIQRSEHPLAQLYCHSIMEHHHFDQCLMILNSPGNQILSGLSIEEYKTTLKIIKQAILATGLALYIKRRGEFFELIRKNQFNLEDPHQKELFLAMLMTACGLSAITKPWPIQQRIAELVATEFFDQGDRERKELNIEPTDLMNREKKNKIPSMQVGFIDAICLQLYEALTHVSEDCFPLLDGCRKNRQKWQALAEQQ

SEQ ID NO: 8633 - protein, 326 aa, Artificial Sequence
  source: /note="Description of Artificial Sequence: Synthetic Destabilizing Domain (DD)"
EETRELQSLAAAVVPSAQTLKITDFSFSDFELSDLETALCTIRMFTDLNLVQNFQMKHEVLCRWILSVKKNYRKNVAYHNWRHAFNTAQCMFAALKAGKIQNKLTDLEILALLIAALSHDLDHRGVNNSYIQRSEHPLAQLYCHSIMEHHHFDQCLMILNSPGNQILSGLSIEEYKTTLKIIKQAILATDLALLIKRRGEFFELIRKNQFNLEDPHQKELFLAMLMTACNLSAITKPWPIQQRIAELVATEFFDQGDRERKELNIEPTDLMNREKKNKIPSMQVGFIDAICLQLYEALTHVSEDCFPLLDGCRKNRQKWQALAEQQ

SEQ ID NO: 8634 - protein, 326 aa, Artificial Sequence
  source: /note="Description of Artificial Sequence: Synthetic Destabilizing Domain (DD)"
EETRELQSLAAAVVPSAQTLKITDFSFSDFELSDLETALCTIRMFTDLNLVQNFQMKHEVLCRWILSVKKNYRKNVAYHNWRHAFNTAQCMFAALKAGKIQNKLTDLEILALLIAALSHDLDHRGVNNSYIQRSEHPLAQLYCHSIMAHHHFDQCLMILNSPGNQILSGLSIEEYKTTLKIIKQAILATDLALYIKRLGEFFELIRKNQFNLEDPHQKELFLAMLMTACDLSAITKPWPIQQRIAELVATEFFDQGDRERKELNIEPTDLMNREKKNKIPSMQVGFIDAICLQLYEALTHVSEDCFPLLDGCRKNRQKWQALAEQQ

SEQ ID NO: 8635 - protein, 326 aa, Artificial Sequence
  source: /note="Description of Artificial Sequence: Synthetic Destabilizing Domain (DD)"
EETRELQSLAAAVVPSAQTLKITDFSFSDFELSDLETALCTIRMFTDLNLVQNFQMKHEVLCRWILSVKKNYRKNVAYHNWRHAFNTAQCMFAALKAGKIQNKLTDLEILALLIAALSHDLDHRGVNNSYIQRSEHPLAQLYCHSIMEHHHFDQCLMILNSPGNQILSGLSIEEYKTTLKIIKQAILATALALYIKRLGEFFELIRKNQFNLEDPHQKELFLAMLMTACDLSAITKPWPIQQRIAELVATEFFDQGDRERKELNIEPTDLMNREKKNKIPSMQVGFIDAICLQLYEALTHVSEDCFPLLDGCRKNRQKWQALAEQQ

SEQ ID NO: 8636 - protein, 571 aa, Artificial Sequence
  source: /note="Description of Artificial Sequence: Synthetic polypeptide"
MVSKGAELFTGIVPILIELNGDVNGHKFSVSGEGEGDATYGKLTLKFICTTGKLPVPWPTLVTTLSYGVQCFSRYPDHMKQHDFFKSAMPEGYIQERTIFFEDDGNYKSRAEVKFEGDTLVNRIELTGTDFKEDGNILGNKMEYNYNAHNVYIMTDKAKNGIKVNFKIRHNIEDGSVQLADHYQQNTPIGDGPVLLPDNHYLSTQSALSKDPNEKRDHMIYFGFVTAAAITHGMDELYKGGSGGGEETRELQSLAAAVVPSAQTLKITDFSFSDFELSDLETALCTIRMFTDLNLVQNFQMKHEVLCRWILSVKKNYRKNVAYHNWRHAFNTAQCMFAALKAGKIQNKLTDLEILALLIAALSHDLDHRGVNNSYIQRSEHPLAQLYCHSIMEHHHFDQCLMILNSPGNQILSGLSIEEYKTTLKIIKQAILATGLALYIKRRGEFFELIRKNQFNLEDPHQKELFLAMLMTACGLSAITKPWPIQQRIAELVATEFFDQGDRERKELNIEPTDLMNREKKNKIPSMQVGFIDAICLQLYEALTHVSEDCFPLLDGCRKNRQKWQALAEQQ

SEQ ID NO: 8637 - protein, 567 aa, Artificial Sequence
  source: /note="Description of Artificial Sequence: Synthetic polypeptide"
MEETRELQSLAAAVVPSAQTLKITDFSFSDFELSDLETALCTIRMFTDLNLVQNFQMKHEVLCRWILSVKKNYRKNVAYHNWRHAFNTAQCMFAALKAGKIQNKLTDLEILALLIAALSHDLDHRGVNNSYIQRSEHPLAQLYCHSIMEHHHFDQCLMILNSPGNQILSGLSIEEYKTTLKIIKQAILATDLALLIKRRGEFFELIRKNQFNLEDPHQKELFLAMLMTACNLSAITKPWPIQQRIAELVATEFFDQGDRERKELNIEPTDLMNREKKNKIPSMQVGFIDAICLQLYEALTHVSEDCFPLLDGCRKNRQKWQALAEQQSGVSKGAELFTGIVPILIELNGDVNGHKFSVSGEGEGDATYGKLTLKFICTTGKLPVPWPTLVTTLSYGVQCFSRYPDHMKQHDFFKSAMPEGYIQERTIFFEDDGNYKSRAEVKFEGDTLVNRIELTGTDFKEDGNILGNKMEYNYNAHNVYIMTDKAKNGIKVNFKIRHNIEDGSVQLADHYQQNTPIGDGPVLLPDNHYLSTQSALSKDPNEKRDHMIYFGFVTAAAITHGMDELYK

SEQ ID NO: 8638 - protein, 567 aa, Artificial Sequence
  source: /note="Description of Artificial Sequence: Synthetic polypeptide"
MVSKGAELFTGIVPILIELNGDVNGHKFSVSGEGEGDATYGKLTLKFICTTGKLPVPWPTLVTTLSYGVQCFSRYPDHMKQHDFFKSAMPEGYIQERTIFFEDDGNYKSRAEVKFEGDTLVNRIELTGTDFKEDGNILGNKMEYNYNAHNVYIMTDKAKNGIKVNFKIRHNIEDGSVQLADHYQQNTPIGDGPVLLPDNHYLSTQSALSKDPNEKRDHMIYFGFVTAAAITHGMDELYKSGEETRELQSLAAAVVPSAQTLKITDFSFSDFELSDLETALCTIRMFTDLNLVQNFQMKHEVLCRWILSVKKNYRKNVAYHNWRHAFNTAQCMFAALKAGKIQNKLTDLEILALLIAALSHDLDHRGVNNSYIQRSEHPLAQLYCHSIMAHHHFDQCLMILNSPGNQILSGLSIEEYKTTLKIIKQAILATDLALYIKRLGEFFELIRKNQFNLEDPHQKELFLAMLMTACDLSAITKPWPIQQRIAELVATEFFDQGDRERKELNIEPTDLMNREKKNKIPSMQVGFIDAICLQLYEALTHVSEDCFPLLDGCRKNRQKWQALAEQQ

SEQ ID NO: 8639 - protein, 567 aa, Artificial Sequence
  source: /note="Description of Artificial Sequence: Synthetic polypeptide"
MVSKGAELFTGIVPILIELNGDVNGHKFSVSGEGEGDATYGKLTLKFICTTGKLPVPWPTLVTTLSYGVQCFSRYPDHMKQHDFFKSAMPEGYIQERTIFFEDDGNYKSRAEVKFEGDTLVNRIELTGTDFKEDGNILGNKMEYNYNAHNVYIMTDKAKNGIKVNFKIRHNIEDGSVQLADHYQQNTPIGDGPVLLPDNHYLSTQSALSKDPNEKRDHMIYFGFVTAAAITHGMDELYKSGEETRELQSLAAAVVPSAQTLKITDFSFSDFELSDLETALCTIRMFTDLNLVQNFQMKHEVLCRWILSVKKNYRKNVAYHNWRHAFNTAQCMFAALKAGKIQNKLTDLEILALLIAALSHDLDHRGVNNSYIQRSEHPLAQLYCHSIMEHHHFDQCLMILNSPGNQILSGLSIEEYKTTLKIIKQAILATALALYIKRLGEFFELIRKNQFNLEDPHQKELFLAMLMTACDLSAITKPWPIQQRIAELVATEFFDQGDRERKELNIEPTDLMNREKKNKIPSMQVGFIDAICLQLYEALTHVSEDCFPLLDGCRKNRQKWQALAEQQ

SEQ ID NO: 8640 - DNA, 978 bp, Artificial Sequence
  source: /note="Description of Artificial Sequence: Synthetic Destabilizing Domain (DD)"
gaagaaacaagagagctacagtcgttagcggctgctgtggtgccatctgcccagacccttaaaattactgactttagcttcagtgactttgagctgtctgatctggaaacagcactgtgtacaattcggatgtttactgacctcaaccttgtgcagaacttccagatgaaacatgaggttctttgcagatggattttaagtgttaagaagaattatcggaagaatgttgcctatcataattggagacatgcctttaatacagctcagtgcatgtttgctgctctaaaagcaggcaaaattcagaacaagctgactgacctggagatacttgcattgctgattgctgcactaagccacgatttggatcaccgtggtgtgaataactcttacatacagcgaagtgaacatccacttgcccagctttactgccattcaatcatggaacaccatcattttgaccagtgcctgatgattcttaatagtccaggcaatcagattctcagtggcctctccattgaagaatataagaccacgttgaaaataatcaagcaagctattttagctacaggcctagcactgtacattaagaggcgaggagaattttttgaacttataagaaaaaatcaattcaatttggaagatcctcatcaaaaggagttgtttttggcaatgctgatgacagcttgtggcctttctgcaattacaaaaccctggcctattcaacaacggatagcagaacttgtagcaactgaattttttgatcaaggagacagagagagaaaagaactcaacatagaacccactgatctaatgaacagggagaagaaaaacaaaatcccaagtatgcaagttgggttcatagatgccatctgcttgcaactgtatgaggccctgacccacgtgtcagaggactgtttccctttgctagatggctgcagaaagaacaggcagaaatggcaggcccttgcagaacagcag

SEQ ID NO: 8641 - DNA, 978 bp, Artificial Sequence
  source: /note="Description of Artificial Sequence: Synthetic Destabilizing Domain (DD)"
gaagaaacaagagagctacagtcgttagcggctgctgtggtgccatctgcccagacccttaaaattactgactttagcttcagtgactttgagctgtctgatctggaaacagcactgtgtacaattcggatgtttactgacctcaaccttgtgcagaacttccagatgaaacatgaggttctttgcagatggattttaagtgttaagaagaattatcggaagaatgttgcctatcataattggagacatgcctttaatacagctcagtgcatgtttgctgctctaaaagcaggcaaaattcagaacaagctgactgacctggagatacttgcattgctgattgctgcactaagccacgatttggatcaccgtggtgtgaataactcttacatacagcgaagtgaacatccacttgcccagctttactgccattcaatcatggaacaccatcattttgaccagtgcctgatgattcttaatagtccaggcaatcagattctcagtggcctctccattgaagaatataagaccacgttgaaaataatcaagcaagctattttagctacagacctagcactgctcattaagaggcgaggagaattttttgaacttataagaaaaaatcaattcaatttggaagatcctcatcaaaaggagttgtttttggcaatgctgatgacagcttgtaatctttctgcaattacaaaaccctggcctattcaacaacggatagcagaacttgtagcaactgaattttttgatcaaggagacagagagagaaaagaactcaacatagaacccactgatctaatgaacagggagaagaaaaacaaaatcccaagtatgcaagttgggttcatagatgccatctgcttgcaactgtatgaggccctgacccacgtgtcagaggactgtttccctttgctagatggctgcagaaagaacaggcagaaatggcaggcccttgcagaacagcag

SEQ ID NO: 8642 - DNA, 978 bp, Artificial Sequence
  source: /note="Description of Artificial Sequence: Synthetic Destabilizing Domain (DD)"
gaagaaacaagagagctacagtcgttagcggctgctgtggtgccatctgcccagacccttaaaattactgactttagcttcagtgactttgagctgtctgatctggaaacagcactgtgtacaattcggatgtttactgacctcaaccttgtgcagaacttccagatgaaacatgaggttctttgcagatggattttaagtgttaagaagaattatcggaagaatgttgcctatcataattggagacatgcctttaatacagctcagtgcatgtttgctgctctaaaagcaggcaaaattcagaacaagctgactgacctggagatacttgcattgctgattgctgcactaagccacgatttggatcaccgtggtgtgaataactcttacatacagcgaagtgaacatccacttgcccagctttactgccattcaatcatggcccaccatcattttgaccagtgcctgatgattcttaatagtccaggcaatcagattctcagtggcctctccattgaagaatataagaccacgttgaaaataatcaagcaagctattttagctacagacctagcactgtacattaagaggctaggagaattttttgaacttataagaaaaaatcaattcaatttggaagatcctcatcaaaaggagttgtttttggcaatgctgatgacagcttgtgatctttctgcaattacaaaaccctggcctattcaacaacggatagcagaacttgtagcaactgaattttttgatcaaggagacagagagagaaaagaactcaacatagaacccactgatctaatgaacagggagaagaaaaacaaaatcccaagtatgcaagttgggttcatagatgccatctgcttgcaactgtatgaggccctgacccacgtgtcagaggactgtttccctttgctagatggctgcagaaagaacaggcagaaatggcaggcccttgcagaacagcag

SEQ ID NO: 8643 - DNA, 978 bp, Artificial Sequence
  source: /note="Description of Artificial Sequence: Synthetic Destabilizing Domain (DD)"
gaagaaacaagagagctacagtcgttagcggctgctgtggtgccatctgcccagacccttaaaattactgactttagcttcagtgactttgagctgtctgatctggaaacagcactgtgtacaattcggatgtttactgacctcaaccttgtgcagaacttccagatgaaacatgaggttctttgcagatggattttaagtgttaagaagaattatcggaagaatgttgcctatcataattggagacatgcctttaatacagctcagtgcatgtttgctgctctaaaagcaggcaaaattcagaacaagctgactgacctggagatacttgcattgctgattgctgcactaagccacgatttggatcaccgtggtgtgaataactcttacatacagcgaagtgaacatccacttgcccagctttactgccattcaatcatggaacaccatcattttgaccagtgcctgatgattcttaatagtccaggcaatcagattctcagtggcctctccattgaagaatataagaccacgttgaaaataatcaagcaagctattttagctacagccctagcactgtacattaagaggctaggagaattttttgaacttataagaaaaaatcaattcaatttggaagatcctcatcaaaaggagttgtttttggcaatgctgatgacagcttgtgatctttctgcaattacaaaaccctggcctattcaacaacggatagcagaacttgtagcaactgaattttttgatcaaggagacagagagagaaaagaactcaacatagaacccactgatctaatgaacagggagaagaaaaacaaaatcccaagtatgcaagttgggttcatagatgccatctgcttgcaactgtatgaggccctgacccacgtgtcagaggactgtttccctttgctagatggctgcagaaagaacaggcagaaatggcaggcccttgcagaacagcag

SEQ ID NO: 8644 - DNA, 1716 bp, Artificial Sequence
  source: /note="Description of Artificial Sequence: Synthetic polynucleotide"
atggtgagcaagggcgccgagctgttcaccggcatcgtgcccatcctgatcgagctgaatggcgatgtgaatggccacaagttcagcgtgagcggcgagggcgagggcgatgccacctacggcaagctgaccctgaagttcatctgcaccaccggcaagctgcctgtgccctggcccaccctggtgaccaccctgagctacggcgtgcagtgcttctcacgctaccccgatcacatgaagcagcacgacttcttcaagagcgccatgcctgagggctacatccaggagcgcaccatcttcttcgaggatgacggcaactacaagtcgcgcgccgaggtgaagttcgagggcgataccctggtgaatcgcatcgagctgaccggcaccgatttcaaggaggatggcaacatcctgggcaataagatggagtacaactacaacgcccacaatgtgtacatcatgaccgacaaggccaagaatggcatcaaggtgaacttcaagatccgccacaacatcgaggatggcagcgtgcagctggccgaccactaccagcagaatacccccatcggcgatggccctgtgctgctgcccgataaccactacctgtccacccagagcgccctgtccaaggaccccaacgagaagcgcgatcacatgatctacttcggcttcgtgaccgccgccgccatcacccacggcatggatgagctgtacaagggaggtagtggtggaggcgaagaaacaagagagctacagtcgttagcggctgctgtggtgccatctgcccagacccttaaaattactgactttagcttcagtgactttgagctgtctgatctggaaacagcactgtgtacaattcggatgtttactgacctcaaccttgtgcagaacttccagatgaaacatgaggttctttgcagatggattttaagtgttaagaagaattatcggaagaatgttgcctatcataattggagacatgcctttaatacagctcagtgcatgtttgctgctctaaaagcaggcaaaattcagaacaagctgactgacctggagatacttgcattgctgattgctgcactaagccacgatttggatcaccgtggtgtgaataactcttacatacagcgaagtgaacatccacttgcccagctttactgccattcaatcatggaacaccatcattttgaccagtgcctgatgattcttaatagtccaggcaatcagattctcagtggcctctccattgaagaatataagaccacgttgaaaataatcaagcaagctattttagctacaggcctagcactgtacattaagaggcgaggagaattttttgaacttataagaaaaaatcaattcaatttggaagatcctcatcaaaaggagttgtttttggcaatgctgatgacagcttgtggcctttctgcaattacaaaaccctggcctattcaacaacggatagcagaacttgtagcaactgaattttttgatcaaggagacagagagagaaaagaactcaacatagaacccactgatctaatgaacagggagaagaaaaacaaaatcccaagtatgcaagttgggttcatagatgccatctgcttgcaactgtatgaggccctgacccacgtgtcagaggactgtttccctttgctagatggctgcagaaagaacaggcagaaatggcaggcccttgcagaacagcagtga

SEQ ID NO: 8645 - DNA, 1704 bp, Artificial Sequence
  source: /note="Description of Artificial Sequence: Synthetic polynucleotide"
atggaagaaacaagagagctacagtcgttagcggctgctgtggtgccatctgcccagacccttaaaattactgactttagcttcagtgactttgagctgtctgatctggaaacagcactgtgtacaattcggatgtttactgacctcaaccttgtgcagaacttccagatgaaacatgaggttctttgcagatggattttaagtgttaagaagaattatcggaagaatgttgcctatcataattggagacatgcctttaatacagctcagtgcatgtttgctgctctaaaagcaggcaaaattcagaacaagctgactgacctggagatacttgcattgctgattgctgcactaagccacgatttggatcaccgtggtgtgaataactcttacatacagcgaagtgaacatccacttgcccagctttactgccattcaatcatggaacaccatcattttgaccagtgcctgatgattcttaatagtccaggcaatcagattctcagtggcctctccattgaagaatataagaccacgttgaaaataatcaagcaagctattttagctacagacctagcactgctcattaagaggcgaggagaattttttgaacttataagaaaaaatcaattcaatttggaagatcctcatcaaaaggagttgtttttggcaatgctgatgacagcttgtaatctttctgcaattacaaaaccctggcctattcaacaacggatagcagaacttgtagcaactgaattttttgatcaaggagacagagagagaaaagaactcaacatagaacccactgatctaatgaacagggagaagaaaaacaaaatcccaagtatgcaagttgggttcatagatgccatctgcttgcaactgtatgaggccctgacccacgtgtcagaggactgtttccctttgctagatggctgcagaaagaacaggcagaaatggcaggcccttgcagaacagcagagtggtgtgagcaagggcgccgagctgttcaccggcatcgtgcccatcctgatcgagctgaatggcgatgtgaatggccacaagttcagcgtgagcggcgagggcgagggcgatgccacctacggcaagctgaccctgaagttcatctgcaccaccggcaagctgcctgtgccctggcccaccctggtgaccaccctgagctacggcgtgcagtgcttctcacgctaccccgatcacatgaagcagcacgacttcttcaagagcgccatgcctgagggctacatccaggagcgcaccatcttcttcgaggatgacggcaactacaagtcgcgcgccgaggtgaagttcgagggcgataccctggtgaatcgcatcgagctgaccggcaccgatttcaaggaggatggcaacatcctgggcaataagatggagtacaactacaacgcccacaatgtgtacatcatgaccgacaaggccaagaatggcatcaaggtgaacttcaagatccgccacaacatcgaggatggcagcgtgcagctggccgaccactaccagcagaatacccccatcggcgatggccctgtgctgctgcccgataaccactacctgtccacccagagcgccctgtccaaggaccccaacgagaagcgcgatcacatgatctacttcggcttcgtgaccgccgccgccatcacccacggcatggatgagctgtacaagtga

SEQ ID NO: 8646 - DNA, 1704 bp, Artificial Sequence
  source: /note="Description of Artificial Sequence: Synthetic polynucleotide"
atggtgagcaagggcgccgagctgttcaccggcatcgtgcccatcctgatcgagctgaatggcgatgtgaatggccacaagttcagcgtgagcggcgagggcgagggcgatgccacctacggcaagctgaccctgaagttcatctgcaccaccggcaagctgcctgtgccctggcccaccctggtgaccaccctgagctacggcgtgcagtgcttctcacgctaccccgatcacatgaagcagcacgacttcttcaagagcgccatgcctgagggctacatccaggagcgcaccatcttcttcgaggatgacggcaactacaagtcgcgcgccgaggtgaagttcgagggcgataccctggtgaatcgcatcgagctgaccggcaccgatttcaaggaggatggcaacatcctgggcaataagatggagtacaactacaacgcccacaatgtgtacatcatgaccgacaaggccaagaatggcatcaaggtgaacttcaagatccgccacaacatcgaggatggcagcgtgcagctggccgaccactaccagcagaatacccccatcggcgatggccctgtgctgctgcccgataaccactacctgtccacccagagcgccctgtccaaggaccccaacgagaagcgcgatcacatgatctacttcggcttcgtgaccgccgccgccatcacccacggcatggatgagctgtacaagagtggtgaagaaacaagagagctacagtcgttagcggctgctgtggtgccatctgcccagacccttaaaattactgactttagcttcagtgactttgagctgtctgatctggaaacagcactgtgtacaattcggatgtttactgacctcaaccttgtgcagaacttccagatgaaacatgaggttctttgcagatggattttaagtgttaagaagaattatcggaagaatgttgcctatcataattggagacatgcctttaatacagctcagtgcatgtttgctgctctaaaagcaggcaaaattcagaacaagctgactgacctggagatacttgcattgctgattgctgcactaagccacgatttggatcaccgtggtgtgaataactcttacatacagcgaagtgaacatccacttgcccagctttactgccattcaatcatggcccaccatcattttgaccagtgcctgatgattcttaatagtccaggcaatcagattctcagtggcctctccattgaagaatataagaccacgttgaaaataatcaagcaagctattttagctacagacctagcactgtacattaagaggctaggagaattttttgaacttataagaaaaaatcaattcaatttggaagatcctcatcaaaaggagttgtttttggcaatgctgatgacagcttgtgatctttctgcaattacaaaaccctggcctattcaacaacggatagcagaacttgtagcaactgaattttttgatcaaggagacagagagagaaaagaactcaacatagaacccactgatctaatgaacagggagaagaaaaacaaaatcccaagtatgcaagttgggttcatagatgccatctgcttgcaactgtatgaggccctgacccacgtgtcagaggactgtttccctttgctagatggctgcagaaagaacaggcagaaatggcaggcccttgcagaacagcagtga

SEQ ID NO: 8647 - DNA, 1704 bp, Artificial Sequence
  source: /note="Description of Artificial Sequence: Synthetic polynucleotide"
atggtgagcaagggcgccgagctgttcaccggcatcgtgcccatcctgatcgagctgaatggcgatgtgaatggccacaagttcagcgtgagcggcgagggcgagggcgatgccacctacggcaagctgaccctgaagttcatctgcaccaccggcaagctgcctgtgccctggcccaccctggtgaccaccctgagctacggcgtgcagtgcttctcacgctaccccgatcacatgaagcagcacgacttcttcaagagcgccatgcctgagggctacatccaggagcgcaccatcttcttcgaggatgacggcaactacaagtcgcgcgccgaggtgaagttcgagggcgataccctggtgaatcgcatcgagctgaccggcaccgatttcaaggaggatggcaacatcctgggcaataagatggagtacaactacaacgcccacaatgtgtacatcatgaccgacaaggccaagaatggcatcaaggtgaacttcaagatccgccacaacatcgaggatggcagcgtgcagctggccgaccactaccagcagaatacccccatcggcgatggccctgtgctgctgcccgataaccactacctgtccacccagagcgccctgtccaaggaccccaacgagaagcgcgatcacatgatctacttcggcttcgtgaccgccgccgccatcacccacggcatggatgagctgtacaagagtggtgaagaaacaagagagctacagtcgttagcggctgctgtggtgccatctgcccagacccttaaaattactgactttagcttcagtgactttgagctgtctgatctggaaacagcactgtgtacaattcggatgtttactgacctcaaccttgtgcagaacttccagatgaaacatgaggttctttgcagatggattttaagtgttaagaagaattatcggaagaatgttgcctatcataattggagacatgcctttaatacagctcagtgcatgtttgctgctctaaaagcaggcaaaattcagaacaagctgactgacctggagatacttgcattgctgattgctgcactaagccacgatttggatcaccgtggtgtgaataactcttacatacagcgaagtgaacatccacttgcccagctttactgccattcaatcatggaacaccatcattttgaccagtgcctgatgattcttaatagtccaggcaatcagattctcagtggcctctccattgaagaatataagaccacgttgaaaataatcaagcaagctattttagctacagccctagcactgtacattaagaggctaggagaattttttgaacttataagaaaaaatcaattcaatttggaagatcctcatcaaaaggagttgtttttggcaatgctgatgacagcttgtgatctttctgcaattacaaaaccctggcctattcaacaacggatagcagaacttgtagcaactgaattttttgatcaaggagacagagagagaaaagaactcaacatagaacccactgatctaatgaacagggagaagaaaaacaaaatcccaagtatgcaagttgggttcatagatgccatctgcttgcaactgtatgaggccctgacccacgtgtcagaggactgtttccctttgctagatggctgcagaaagaacaggcagaaatggcaggcccttgcagaacagcagtga

SEQ ID NO: 8648 - protein, 235 aa, Artificial Sequence
  source: /note="Description of Artificial Sequence: Synthetic Payload sequence"
MSKGEEDNMAIIKEFMRFKVHMEGSVNGHEFEIEGEGEGRPYEGTQTAKLKVTKGGPLPFAWDILSPQFMYGSKAYVKHPADIPDYLKLSFPEGFKWERVMNFEDGGVVTVTQDSSLQDGEFIYKVKLRGTNFPSDGPVMQKKTMGWEASSERMYPEDGALKGEIKQRLKLKDGGHYDAEVKTTYKAKKPVQLPGAYNVNIKLDITSHNEDYTIVEQYERAEGRHSTGGMDELYK

SEQ ID NO: 8649 - protein, 732 aa, Artificial Sequence
  source: /note="Description of Artificial Sequence: Synthetic Construct"
MDWTWILFLVAAATRVHSYPYDVPDYANWVNVISDLKKIEDLIQSMHIDATLYTESDVHPSCKVTAMKCFLLELQVISLESGDASIHDTVENLIILANNSLSSNGNVTESGCKECEELEEKNIKEFLQSFVHIVQMFINTSSGGGSGGGGSGGGGSGGGGSGGGSLQITCPPPMSVEHADIWVKSYSLYSRERYICNSGFKRKAGTSSLTECVLNKATNVAHWTTPSLKCIRDPALVHQRPAPPSTVTTAGVTPQPESLSPSGKEPAASSPSSNNTAATTAAIVPGSQLMPSKSPSTGTTEISSHESSHGTPSQTTAKNWELTASASHQPPGVYPQGHSDTTVAISTSTVLLCGLSAVSLLACYLKSRQTPPLASVEMEAMEALPVTWGTSSRDEDLENCSHHLSGEETRELQSLAAAVVPSAQTLKITDFSFSDFELSDLETALCTIRMFTDLNLVQNFQMKHEVLCRWILSVKKNYRKNVAYHNWRHAFNTAQCMFAALKAGKIQNKLTDLEILALLIAALSHDLDHRGVNNSYIQRSEHPLAQLYCHSIMEHHHFDQCLMILNSPGNQILSGLSIEEYKTTLKIIKQAILATDLALYIKRRGEFFELIRKNQFNLEDPHQKELFLAMLMTACDLSAITKPWPIQQRIAELVATEFFDQGDRERKELNIEPTDLMNREKKNKIPSMQVGFIDAICLQLYEALTHVSEDCFPLLDGCRKNRQKWQALAEQQ

SEQ ID NO: 8650 - protein, 724 aa, Artificial Sequence
  source: /note="Description of Artificial Sequence: Synthetic Construct"
MDWTWILFLVAAATRVHSNWVNVISDLKKIEDLIQSMHIDATLYTESDVHPSCKVTAMKCFLLELQVISLESGDASIHDTVENLIILANNSLSSNGNVTESGCKECEELEEKNIKEFLQSFVHIVQMFINTSSGGGSGGGGSGGGGSGGGGSGGGSLQITCPPPMSVEHADIWVKSYSLYSRERYICNSGFKRKAGTSSLTECVLNKATNVAHWTTPSLKCIRDPALVHQRPAPPSTVTTAGVTPQPESLSPSGKEPAASSPSSNNTAATTAAIVPGSQLMPSKSPSTGTTEISSHESSHGTPSQTTAKNWELTASASHQPPGVYPQGHSDTTVAISTSTVLLCGLSAVSLLACYLKSRQTPPLASVEMEAMEALPVTWGTSSRDEDLENCSHHLGSGEETRELQSLAAAVVPSAQTLKITDFSFSDFELSDLETALCTIRMFTDLNLVQNFQMKHEVLCRWILSVKKNYRKNVAYHNWRHAFNTAQCMFAALKAGKIQNKLTDLEILALLIAALSHDLDHRGVNNSYIQRSEHPLAQLYCHSIMEHHHFDQCLMILNSPGNQILSGLSIEEYKTTLKIIKQAILATDLALYIKRRGEFAELIRKNQFNLEDPHQKELFLAMLMTACDLSAITKPWPIQQRIAELVATEFFDQGDRERKELNIEPTDLMNREKKNKIPSMQVGFIDAICLQLYEALTHVSEDCFPLLDGCRKNRQKWQALAEQQ

SEQ ID NO: 8651 - protein, 724 aa, Artificial Sequence
  source: /note="Description of Artificial Sequence: Synthetic Construct"
MDWTWILFLVAAATRVHSNWVNVISDLKKIEDLIQSMHIDATLYTESDVHPSCKVTAMKCFLLELQVISLESGDASIHDTVENLIILANNSLSSNGNVTESGCKECEELEEKNIKEFLQSFVHIVQMFINTSSGGGSGGGGSGGGGSGGGGSGGGSLQITCPPPMSVEHADIWVKSYSLYSRERYICNSGFKRKAGTSSLTECVLNKATNVAHWTTPSLKCIRDPALVHQRPAPPSTVTTAGVTPQPESLSPSGKEPAASSPSSNNTAATTAAIVPGSQLMPSKSPSTGTTEISSHESSHGTPSQTTAKNWELTASASHQPPGVYPQGHSDTTVAISTSTVLLCGLSAVSLLACYLKSRQTPPLASVEMEAMEALPVTWGTSSRDEDLENCSHHLGSGEETRELQSLAAAVVPSAQTLKITDFSFSDFELSDLETALCTIRMFTDLNLVQNFQMKHEVLCRWILSVKKNYRKNVAYHNWRHAFNTAQCMFAALKAGKIQNKLTDLEILALLIAALSHDLDHRGVNNSYIQRSEHPLAQLYCHSIMEHHHFDQCLMILNSPGNQILSGLSIEEYKTTLKIIKQAILATDLALYIKRLGEFAELIRKNQFNLEDPHQKELFLAMLMTACDLSAITKPWPIQQRIAELVATEFFDQGDRERKELNIEPTDLMNREKKNKIPSMQVGFIDAICLQLYEALTHVSEDCFPLLDGCRKNRQKWQALAEQQ

SEQ ID NO: 8652 - protein, 724 aa, Artificial Sequence
  source: /note="Description of Artificial Sequence: Synthetic Construct"
MDWTWILFLVAAATRVHSNWVNVISDLKKIEDLIQSMHIDATLYTESDVHPSCKVTAMKCFLLELQVISLESGDASIHDTVENLIILANNSLSSNGNVTESGCKECEELEEKNIKEFLQSFVHIVQMFINTSSGGGSGGGGSGGGGSGGGGSGGGSLQITCPPPMSVEHADIWVKSYSLYSRERYICNSGFKRKAGTSSLTECVLNKATNVAHWTTPSLKCIRDPALVHQRPAPPSTVTTAGVTPQPESLSPSGKEPAASSPSSNNTAATTAAIVPGSQLMPSKSPSTGTTEISSHESSHGTPSQTTAKNWELTASASHQPPGVYPQGHSDTTVAISTSTVLLCGLSAVSLLACYLKSRQTPPLASVEMEAMEALPVTWGTSSRDEDLENCSHHLGSGEETRELQSLAAAVVPSAQTLKITDFSFSDFELSDLETALCTIRMFTDLNLVQNFQMKHEVLCRWILSVKKNYRKNVAYHNWRHAFNTAQCMFAALKAGKIQNKLTDLEILALLIAALSHDLDHRGVNNSYIQRSEHPLAQLYCHSIMEHHHFDQCLMILNSPGNQILSGLSIEEYKTTLKIIKQAILATDLALYIKRRGEFFELIRKNQFNLEDPHQKELFLAMLMTACDLSAITKPWPIQQRIAELVATEFFDQGDRERKELNIEPTDLMNREKKNKIPSMQVGFIDAICLQLYEALTHVSEDCFPLLDGCRKNRQKWQALAEQQ

SEQ ID NO: 8653 - protein, 414 aa, Artificial Sequence
  source: /note="Description of Artificial Sequence: Synthetic Construct"
MDWTWILFLVAAATRVHSDYKDDDDKNWVNVISDLKKIEDLIQSMHIDATLYTESDVHPSCKVTAMKCFLLELQVISLESGDASIHDTVENLIILANNSLSSNGNVTESGCKECEELEEKNIKEFLQSFVHIVQMFINTSSGGGSGGGGSGGGGSGGGGSGGGSLQYPYDVPDYAITCPPPMSVEHADIWVKSYSLYSRERYICNSGFKRKAGTSSLTECVLNKATNVAHWTTPSLKCIRDPALVHQRPAPPSTVTTAGVTPQPESLSPSGKEPAASSPSSNNTAATTAAIVPGSQLMPSKSPSTGTTEISSHESSHGTPSQTTAKNWELTASASHQPPGVYPQGHSDTTVAISTSTVLLCGLSAVSLLACYLKSRQTPPLASVEMEAMEALPVTWGTSSRDEDLENCSHHLGS

SEQ ID NO: 8654 - protein, 741 aa, Artificial Sequence
  source: /note="Description of Artificial Sequence: Synthetic Construct"
MDWTWILFLVAAATRVHSDYKDDDDKNWVNVISDLKKIEDLIQSMHIDATLYTESDVHPSCKVTAMKCFLLELQVISLESGDASIHDTVENLIILANNSLSSNGNVTESGCKECEELEEKNIKEFLQSFVHIVQMFINTSSGGGSGGGGSGGGGSGGGGSGGGSLQYPYDVPDYAITCPPPMSVEHADIWVKSYSLYSRERYICNSGFKRKAGTSSLTECVLNKATNVAHWTTPSLKCIRDPALVHQRPAPPSTVTTAGVTPQPESLSPSGKEPAASSPSSNNTAATTAAIVPGSQLMPSKSPSTGTTEISSHESSHGTPSQTTAKNWELTASASHQPPGVYPQGHSDTTVAISTSTVLLCGLSAVSLLACYLKSRQTPPLASVEMEAMEALPVTWGTSSRDEDLENCSHHLGSGEETRELQSLAAAVVPSAQTLKITDFSFSDFELSDLETALCTIRMFTDLNLVQNFQMKHEVLCRWILSVKKNYRKNVAYHNWRHAFNTAQCMFAALKAGKIQNKLTDLEILALLIAALSHDLDHRGVNNSYIQRSEHPLAQLYCHSIMEHHHFDQCLMILNSPGNQILSGLSIEEYKTTLKIIKQAILATDLALYIKRRGEFFELIRKNQFNLEDPHQKELFLAMLMTACDLSAITKPWPIQQRIAELVATEFFDQGDRERKELNIEPTDLMNREKKNKIPSMQVGFIDAICLQLYEALTHVSEDCFPLLDGCRKNRQKWQALAEQQ

SEQ ID NO: 8655 - protein, 741 aa, Artificial Sequence
  source: /note="Description of Artificial Sequence: Synthetic Construct"
MDWTWILFLVAAATRVHSDYKDDDDKNWVNVISDLKKIEDLIQSMHIDATLYTESDVHPSCKVTAMKCFLLELQVISLESGDASIHDTVENLIILANNSLSSNGNVTESGCKECEELEEKNIKEFLQSFVHIVQMFINTSSGGGSGGGGSGGGGSGGGGSGGGSLQYPYDVPDYAITCPPPMSVEHADIWVKSYSLYSRERYICNSGFKRKAGTSSLTECVLNKATNVAHWTTPSLKCIRDPALVHQRPAPPSTVTTAGVTPQPESLSPSGKEPAASSPSSNNTAATTAAIVPGSQLMPSKSPSTGTTEISSHESSHGTPSQTTAKNWELTASASHQPPGVYPQGHSDTTVAISTSTVLLCGLSAVSLLACYLKSRQTPPLASVEMEAMEALPVTWGTSSRDEDLENCSHHLGSGEETRELQSLAAAVVPSAQTLKITDFSFSDFELSDLETALCTIRMFTDLNLVQNFQMKHEVLCRWILSVKKNYRKNVAYHNWRHAFNTAQCMFAALKAGKIQNKLTDLEILALLIAALSHDLDHRGVNNSYIQRSEHPLAQLYCHSIMEHHHFDQCLMILNSPGNQILSGLSIEEYKTTLKIIKQAILATDLALYIKRRGEFAELIRKNQFNLEDPHQKELFLAMLMTACDLSAITKPWPIQQRIAELVATEFFDQGDRERKELNIEPTDLMNREKKNKIPSMQVGFIDAICLQLYEALTHVSEDCFPLLDGCRKNRQKWQALAEQQ

SEQ ID NO: 8656 - protein, 741 aa, Artificial Sequence
  source: /note="Description of Artificial Sequence: Synthetic Construct"
MDWTWILFLVAAATRVHSDYKDDDDKNWVNVISDLKKIEDLIQSMHIDATLYTESDVHPSCKVTAMKCFLLELQVISLESGDASIHDTVENLIILANNSLSSNGNVTESGCKECEELEEKNIKEFLQSFVHIVQMFINTSSGGGSGGGGSGGGGSGGGGSGGGSLQYPYDVPDYAITCPPPMSVEHADIWVKSYSLYSRERYICNSGFKRKAGTSSLTECVLNKATNVAHWTTPSLKCIRDPALVHQRPAPPSTVTTAGVTPQPESLSPSGKEPAASSPSSNNTAATTAAIVPGSQLMPSKSPSTGTTEISSHESSHGTPSQTTAKNWELTASASHQPPGVYPQGHSDTTVAISTSTVLLCGLSAVSLLACYLKSRQTPPLASVEMEAMEALPVTWGTSSRDEDLENCSHHLGSGEETRELQSLAAAVVPSAQTLKITDFSFSDFELSDLETALCTIRMFTDLNLVQNFQMKHEVLCRWILSVKKNYRKNVAYHNWRHAFNTAQCMFAALKAGKIQNKLTDLEILALLIAALSHDLDHRGVNNSYIQRSEHPLAQLYCHSIMEHHHFDQCLMILNSPGNQILSGLSIEEYKTTLKIIKQAILATDLALYIKRLGEFFELIRKNQFNLEDPHQKELFLAMLMTACDLSAITKPWPIQQRIAELVATEFFDQGDRERKELNIEPTDLMNREKKNKIPSMQVGFIDAICLQLYEALTHVSEDCFPLLDGCRKNRQKWQALAEQQ

SEQ ID NO: 8657 - protein, 741 aa, Artificial Sequence
  source: /note="Description of Artificial Sequence: Synthetic Construct"
MDWTWILFLVAAATRVHSDYKDDDDKNWVNVISDLKKIEDLIQSMHIDATLYTESDVHPSCKVTAMKCFLLELQVISLESGDASIHDTVENLIILANNSLSSNGNVTESGCKECEELEEKNIKEFLQSFVHIVQMFINTSSGGGSGGGGSGGGGSGGGGSGGGSLQYPYDVPDYAITCPPPMSVEHADIWVKSYSLYSRERYICNSGFKRKAGTSSLTECVLNKATNVAHWTTPSLKCIRDPALVHQRPAPPSTVTTAGVTPQPESLSPSGKEPAASSPSSNNTAATTAAIVPGSQLMPSKSPSTGTTEISSHESSHGTPSQTTAKNWELTASASHQPPGVYPQGHSDTTVAISTSTVLLCGLSAVSLLACYLKSRQTPPLASVEMEAMEALPVTWGTSSRDEDLENCSHHLGSGEETRELQSLAAAVVPSAQTLKITDFSFSDFELSDLETALCTIRMFTDLNLVQNFQMKHEVLCRWILSVKKNYRKNVAYHNWRHAFNTAQCMFAALKAGKIQNKLTDLEILALLIAALSHDLDHRGVNNSYIQRSEHPLAQLYCHSIMEHHHFDQCLMILNSPGNQILSGLSIEEYKTTLKIIKQAILATDLALYIKRLGEFAELIRKNQFNLEDPHQKELFLAMLMTACDLSAITKPWPIQQRIAELVATEFFDQGDRERKELNIEPTDLMNREKKNKIPSMQVGFIDAICLQLYEALTHVSEDCFPLLDGCRKNRQKWQALAEQQ

SEQ ID NO: 8658 - protein, 755 aa, Artificial Sequence
  source: /note="Description of Artificial Sequence: Synthetic Construct"
MDWTWILFLVAAATRVHSDYKDDDDKNWVNVISDLKKIEDLIQSMHIDATLYTESDVHPSCKVTAMKCFLLELQVISLESGDASIHDTVENLIILANNSLSSNGNVTESGCKECEELEEKNIKEFLQSFVHIVQMFINTSSGGGSGGGGSGGGGSGGGGSGGGSLQYPYDVPDYAITCPPPMSVEHADIWVKSYSLYSRERYICNSGFKRKAGTSSLTECVLNKATNVAHWTTPSLKCIRDPALVHQRPAPPSTVTTAGVTPQPESLSPSGKEPAASSPSSNNTAATTAAIVPGSQLMPSKSPSTGTTEISSHESSHGTPSQTTAKNWELTASASHQPPGVYPQGHSDTTVAISTSTVLLCGLSAVSLLACYLKSRQTPPLASVEMEAMEALPVTWGTSSRDEDLENCSHHLGSGEETRELQSLAAAVVPSAQTLKITDFSFSDFELSDLETALCTIRMFTDLNLVQNFQMKHEVLCRWILSVKKNYRKNVAYHNWRHAFNTAQCMFAALKAGKIQNKLTDLEILALLIAALSHDLDHRGVNNSYIQRSEHPLAQLYCHSIMEHHHFDQCLMILNSPGNQILSGLSIEEYKTTLKIIKQAILATDLALYIKRLGEFFELIRKNQFNLEDPHQKELFLAMLMTACDLSAITKPWPIQQRIAELVATEFFDQGDRERKELNIEPTDLMNREKKNKIPSMQVGFIDAICLQLYEALTHVSEDCFPLLDGCRKNRQKWQALAEQQGKPIPNPLLGLDST

SEQ ID NO: 8659 - protein, 726 aa, Artificial Sequence
  source: /note="Description of Artificial Sequence: Synthetic Construct"
MDWTWILFLVAAATRVHSNWVNVISDLKKIEDLIQSMHIDATLYTESDVHPSCKVTAMKCFLLELQVISLESGDASIHDTVENLIILANNSLSSNGNVTESGCKECEELEEKNIKEFLQSFVHIVQMFINTSSGGGSGGGGSGGGGSGGGGSGGGSLQITCPPPMSVEHADIWVKSYSLYSRERYICNSGFKRKAGTSSLTECVLNKATNVAHWTTPSLKCIRDPALVHQRPAPPSTVTTAGVTPQPESLSPSGKEPAASSPSSNNTAATTAAIVPGSQLMPSKSPSTGTTEISSHESSHGTPSQTTAKNWELTASASHQPPGVYPQGHSDTTVAISTSTVLLCGLSAVSLLACYLKSRQTPPLASVEMEAMEALPVTWGTSSRDEDLENCSHHLGSGEETRELQSLAAAVVPSAQTLKITDFSFSDFELSDLETALCTIRMFTDLNLVQNFQMKHEVLCRWILSVKKNYRKNVAYHNWRHAFNTAQCMFAALKAGKIQNKLTDLEILALLIAALSHDLDHRGVNNSYIQRSEHPLAQLYCHSIMEHHHFDQCLMILNSPGNQILSGLSIEEYKTTLKIIKQAILATDLALYIKRLGEFFELIRKNQFNLEDPHQKELFLAMLMTACDLSAITKPWPIQQRIAELVATEFFDQGDRERKELNIEPTDLMNREKKNKIPSMQVGFIDAICLQLYEALTHVSEDCFPLLDGCRKNRQKWQALAEQQGS

SEQ ID NO: 8660 - protein, 726 aa, Artificial Sequence
  source: /note="Description of Artificial Sequence: Synthetic Construct"
MDWTWILFLVAAATRVHSNWVNVISDLKKIEDLIQSMHIDATLYTESDVHPSCKVTAMKCFLLELQVISLESGDASIHDTVENLIILANNSLSSNGNVTESGCKECEELEEKNIKEFLQSFVHIVQMFINTSSGGGSGGGGSGGGGSGGGGSGGGSLQITCPPPMSVEHADIWVKSYSLYSRERYICNSGFKRKAGTSSLTECVLNKATNVAHWTTPSLKCIRDPALVHQRPAPPSTVTTAGVTPQPESLSPSGKEPAASSPSSNNTAATTAAIVPGSQLMPSKSPSTGTTEISSHESSHGTPSQTTAKNWELTASASHQPPGVYPQGHSDTTVAISTSTVLLCGLSAVSLLACYLKSRQTPPLASVEMEAMEALPVTWGTSSRDEDLENCSHHLGSGEETRELQSLAAAVVPSAQTLKITDFSFSDFELSDLETALCTIRMFTDLNLVQNFQMKHEVLCRWILSVKKNYRKNVAYHNWRHAFNTAQCMFAALKAGKIQNKLTDLEILALLIAALSHDLDHRGVNNSYIQRSEHPLAQLYCHSIMEHHHFDQCLMILNSPGNQILSGLSIEEYKTTLKIIKQAILATDLALYIKRIGEFFELIRKNQFNLEDPHQKELFLAMLMTACDLSAITKPWPIQQRIAELVATEFFDQGDRERKELNIEPTDLMNREKKNKIPSMQVGFIDAICLQLYEALTHVSEDCFPLLDGCRKNRQKWQALAEQQGS

SEQ ID NO: 8661 - protein, 726 aa, Artificial Sequence
  source: /note="Description of Artificial Sequence: Synthetic Construct"
MDWTWILFLVAAATRVHSNWVNVISDLKKIEDLIQSMHIDATLYTESDVHPSCKVTAMKCFLLELQVISLESGDASIHDTVENLIILANNSLSSNGNVTESGCKECEELEEKNIKEFLQSFVHIVQMFINTSSGGGSGGGGSGGGGSGGGGSGGGSLQITCPPPMSVEHADIWVKSYSLYSRERYICNSGFKRKAGTSSLTECVLNKATNVAHWTTPSLKCIRDPALVHQRPAPPSTVTTAGVTPQPESLSPSGKEPAASSPSSNNTAATTAAIVPGSQLMPSKSPSTGTTEISSHESSHGTPSQTTAKNWELTASASHQPPGVYPQGHSDTTVAISTSTVLLCGLSAVSLLACYLKSRQTPPLASVEMEAMEALPVTWGTSSRDEDLENCSHHLGSGEETRELQSLAAAVVPSAQTLKITDFSFSDFELSDLETALCTIRMFTDLNLVQNFQMKHEVLCRWILSVKKNYRKNVAYHNWRHAFNTAQCMFAALKAGKIQNKLTDLEILALLIAALSHDLDHRGVNNSYIQRSEHPLAQLYCHSIMEHHHFDQCLMILNSPGNQILSGLSIEEYKTTLKIIKQAILATDLALYIKRGGEFFELIRKNQFNLEDPHQKELFLAMLMTACDLSAITKPWPIQQRIAELVATEFFDQGDRERKELNIEPTDLMNREKKNKIPSMQVGFIDAICLQLYEALTHVSEDCFPLLDGCRKNRQKWQALAEQQGS

SEQ ID NO: 8662 - protein, 460 aa, Artificial Sequence
  source: /note="Description of Artificial Sequence: Synthetic Construct"
MDWTWILFLVAAATRVHSNWVNVISDLKKIEDLIQSMHIDATLYTESDVHPSCKVTAMKCFLLELQVISLESGDASIHDTVENLIILANNSLSSNGNVTESGCKECEELEEKNIKEFLQSFVHIVQMFINTSGSEETRELQSLAAAVVPSAQTLKITDFSFSDFELSDLETALCTIRMFTDLNLVQNFQMKHEVLCRWILSVKKNYRKNVAYHNWRHAFNTAQCMFAALKAGKIQNKLTDLEILALLIAALSHDLDHRGVNNSYIQRSEHPLAQLYCHSIMEHHHFDQCLMILNSPGNQILSGLSIEEYKTTLKIIKQAILATDLALYIKRLGEFAELIRKNQFNLEDPHQKELFLAMLMTACDLSAITKPWPIQQRIAELVATEFFDQGDRERKELNIEPTDLMNREKKNKIPSMQVGFIDAICLQLYEALTHVSEDCFPLLDGCRKNRQKWQALAEQQ

SEQ ID NO: 8663 - protein, 235 aa, Artificial Sequence; identical to SEQ ID NO: 8648
  source: /note="Description of Artificial Sequence: Synthetic Construct"

SEQ ID NO: 8664 - protein, 717 aa, Artificial Sequence
  source: /note="Description of Artificial Sequence: Synthetic Construct"
MDWTWILFLVAAATRVHSNWVNVISDLKKIEDLIQSMHIDATLYTESDVHPSCKVTAMKCFLLELQVISLESGDASIHDTVENLIILANNSLSSNGNVTESGCKECEELEEKNIKEFLQSFVHIVQMFINTSGSEETRELQSLAAAVVPSAQTLKITDFSFSDFELSDLETALCTIRMFTDLNLVQNFQMKHEVLCRWILSVKKNYRKNVAYHNWRHAFNTAQCMFAALKAGKIQNKLTDLEILALLIAALSHDLDHRGVNNSYIQRSEHPLAQLYCHSIMEHHHFDQCLMILNSPGNQILSGLSIEEYKTTLKIIKQAILATDLALYIKRLGEFAELIRKNQFNLEDPHQKELFLAMLMTACDLSAITKPWPIQQRIAELVATEFFDQGDRERKELNIEPTDLMNREKKNKIPSMQVGFIDAICLQLYEALTHVSEDCFPLLDGCRKNRQKWQALAEQQGSGATNFSLLKQAGDVEENPGPLSKGEEDNMAIIKEFMRFKVHMEGSVNGHEFEIEGEGEGRPYEGTQTAKLKVTKGGPLPFAWDILSPQFMYGSKAYVKHPADIPDYLKLSFPEGFKWERVMNFEDGGVVTVTQDSSLQDGEFIYKVKLRGTNFPSDGPVMQKKTMGWEASSERMYPEDGALKGEIKQRLKLKDGGHYDAEVKTTYKAKKPVQLPGAYNVNIKLDITSHNEDYTIVEQYERAEGRHSTGGMDELYK

SEQ ID NO: 8665 - DNA, 78 bp, Artificial Sequence
  source: /note="Description of Artificial Sequence: Synthetic Linker"
tcaggtggcggtagtggtgggggaggatctggaggcggaggaagcgggggtggaggttcaggtggaggcagcttgcaa

SEQ ID NO: 8666 - DNA, 705 bp, Artificial Sequence
  source: /note="Description of Artificial Sequence: Synthetic Payload sequence"
atgagcaagggcgaggaggataacatggccatcatcaaggagttcatgcgcttcaaggtgcacatggagggctccgtgaacggccacgagttcgagatcgagggcgagggcgagggccgcccctacgagggcacccagaccgccaagctgaaggtgaccaagggtggccccctgcccttcgcctgggacatcctgtcccctcagttcatgtacggctccaaggcctacgtgaagcaccccgccgacatccccgactacttgaagctgtccttccccgagggcttcaagtgggagcgcgtgatgaacttcgaggacggcggcgtggtgaccgtgacccaggactcctccctgcaggacggcgagttcatctacaaggtgaagctgcgcggcaccaacttcccctccgacggccccgtaatgcagaagaagaccatgggctgggaggcctcctccgagcggatgtaccccgaggacggcgccctgaagggcgagatcaagcagaggctgaagctgaaggacggcggccactacgacgctgaggtcaagaccacctacaaggccaagaagcccgtgcagctgcccggcgcctacaacgtcaacatcaagttggacatcacctcccacaacgaggactacaccatcgtggaacagtacgaacgcgccgagggccgccactccaccggcggcatggacgagctgtacaag

SEQ ID NO: 8667 - DNA, 576 bp, Artificial Sequence
  source: /note="Description of Artificial Sequence: Synthetic IRES sequence"
cgcccctctccctcccccccccctaacgttactggccgaagccgcttggaataaggccggtgtgcgtttgtctatatgttattttccaccatattgccgtcttttggcaatgtgagggcccggaaacctggccctgtcttcttgacgagcattcctaggggtctttcccctctcgccaaaggaatgcaaggtctgttgaatgtcgtgaaggaagcagttcctctggaagcttcttgaagacaaacaacgtctgtagcgaccctttgcaggcagcggaaccccccacctggcgacaggtgcctctgcggccaaaagccacgtgtataagatacacctgcaaaggcggcacaaccccagtgccacgttgtgagttggatagttgtggaaagagtcaaatggctctcctcaagcgtattcaacaaggggctgaaggatgcccagaaggtaccccattgtatgggatctgatctggggcctcggtgcacatgctttacatgtgtttagtcgaggttaaaaaaacgtctaggccccccgaaccacggggacgtggttttcctttgaaaaacacgatgataa

SEQ ID NO: 8668 - DNA, 28 bp, Artificial Sequence
  source: /note="Description of Artificial Sequence: Synthetic Spacer"
tctagataatacgactcactagagatcc

SEQ ID NO: 8669 - DNA, 16 bp, Artificial Sequence
  source: /note="Description of Artificial Sequence: Synthetic Spacer"
tatggccacaaccatg

SEQ ID NO: 8670 - DNA, 2199 bp, Artificial Sequence
  source: /note="Description of Artificial Sequence: Synthetic Construct"
atggactggacatggatactcttcctggtagcagccgccacacgagtgcacagctacccatacgatgttccagattacgctaactgggtgaacgtgatctccgacctgaaaaagatcgaggatttgatccagagcatgcacattgacgccaccctgtataccgagtccgacgtgcacccgagttgcaaggtgactgccatgaagtgcttcctgctggagctgcaagtgatcagcctggagagcggcgacgccagcatccacgacaccgtggaaaaccttatcattctggccaacaatagcctgagcagcaacggcaacgtgaccgaaagcggatgtaaggaatgcgaggaactggaagagaagaatatcaaagaattcctgcaaagcttcgtgcacatcgtgcagatgttcatcaacacttcttcaggtggcggtagtggtgggggaggatctggaggcggaggaagcgggggtggaggttcaggaggagggagcttgcaaattacctgcccccctccgatgagcgtggagcacgccgacatctgggtcaagagctacagcttgtatagtagggagcggtacatctgtaacagcgggttcaagaggaaggccgggaccagctcactgaccgagtgcgtgttgaacaaggccaccaacgtggcccactggaccacccctagccttaagtgcatcagggacccagcgctcgtacaccagagacccgcgcctccctctacggtaaccacggcaggcgtaaccccccagcccgagagcctgtccccgagcggcaaggagcctgcagcgagcagcccctcaagcaacaacacagccgctaccaccgcggcaatcgtgcccggcagccagctgatgccctcaaagagccccagcaccggcaccactgagataagcagccacgagagctcacacggcactccctcacagaccactgccaagaattgggagctgaccgcctctgccagccaccagcccccaggcgtgtatccccagggccacagcgacaccacggtcgccatcagcacatctacagtgcttttgtgcggccttagcgccgtgtcactgctggcatgctacttgaaaagtaggcaaactccccctcttgccagtgtggaaatggaggccatggaagccctgcccgtgacctggggcaccagttctagggacgaggaccttgagaactgctcacatcatttgagtggtgaagaaacaagagagctacagtcgttagcggctgctgtggtgccatctgcccagacccttaaaattactgactttagcttcagtgactttgagctgtctgatctggaaacagcactgtgtacaattcggatgtttactgacctcaaccttgtgcagaacttccagatgaaacatgaggttctttgcagatggattttaagtgttaagaagaattatcggaagaatgttgcctatcataattggagacatgcctttaatacagctcagtgcatgtttgctgctctaaaagcaggcaaaattcagaacaagctgactgacctggagatacttgcattgctgattgctgcactaagccacgatttggatcaccgtggtgtgaataactcttacatacagcgaagtgaacatccacttgcccagctttactgccattcaatcatggaacaccatcattttgaccagtgcctgatgattcttaatagtccaggcaatcagattctcagtggcctctccattgaagaatataagaccacgttgaaaataatcaagcaagctattttagctacagacctagcactgtacattaagaggcgaggagaattttttgaacttataagaaaaaatcaattcaatttggaagatcctcatcaaaaggagttgtttttggcaatgctgatgacagcttgtgatctttctgcaattacaaaaccctggcctattcaacaacggatagcagaacttgtagcaactgaattttttgatcaaggagacagagagagaaaagaactcaacatagaacccactgatctaatgaacagggagaagaaaaacaaaatcccaagtatgcaagttgggttcatagatgccatctgcttgcaactgtatgaggccctgacccacgtgtcagaggactgtttccctttgctagatggctgcagaaagaacaggcagaaatggcaggcccttgcagaacagcagtga

SEQ ID NO: 8671 - DNA, 2175 bp, Artificial Sequence
  source: /note="Description of Artificial Sequence: Synthetic Construct"
atggactggacatggatactcttcctggtagcagccgccacacgagtgcacagcaactgggtgaacgtgatctccgacctgaaaaagatcgaggatttgatccagagcatgcacattgacgccaccctgtataccgagtccgacgtgcacccgagttgcaaggtgactgccatgaagtgcttcctgctggagctgcaagtgatcagcctggagagcggcgacgccagcatccacgacaccgtggaaaaccttatcattctggccaacaatagcctgagcagcaacggcaacgtgaccgaaagcggatgtaaggaatgcgaggaactggaagagaagaatatcaaagaattcctgcaaagcttcgtgcacatcgtgcagatgttcatcaacacttcttcaggtggcggtagtggtgggggaggatctggaggcggaggaagcgggggtggaggttcaggaggagggagcttgcaaattacctgcccccctccgatgagcgtggagcacgccgacatctgggtcaagagctacagcttgtatagtagggagcggtacatctgtaacagcgggttcaagaggaaggccgggaccagctcactgaccgagtgcgtgttgaacaaggccaccaacgtggcccactggaccacccctagccttaagtgcatcagggacccagcgctcgtacaccagagacccgcgcctccctctacggtaaccacggcaggcgtaaccccccagcccgagagcctgtccccgagcggcaaggagcctgcagcgagcagcccctcaagcaacaacacagccgctaccaccgcggcaatcgtgcccggcagccagctgatgccctcaaagagccccagcaccggcaccactgagataagcagccacgagagctcacacggcactccctcacagaccactgccaagaattgggagctgaccgcctctgccagccaccagcccccaggcgtgtatccccagggccacagcgacaccacggtcgccatcagcacatctacagtgcttttgtgcggccttagcgccgtgtcactgctggcatgctacttgaaaagtaggcaaactccccctcttgccagtgtggaaatggaggccatggaagccctgcccgtgacctggggcaccagttctagggacgaggaccttgagaactgctcacatcatttgggatccggtgaagaaacaagagagctacagtcgttagcggctgctgtggtgccatctgcccagacccttaaaattactgactttagcttcagtgactttgagctgtctgatctggaaacagcactgtgtacaattcggatgtttactgacctcaaccttgtgcagaacttccagatgaaacatgaggttctttgcagatggattttaagtgttaagaagaattatcggaagaatgttgcctatcataattggagacatgcctttaatacagctcagtgcatgtttgctgctctaaaagcaggcaaaattcagaacaagctgactgacctggagatacttgcattgctgattgctgcactaagccacgatttggatcaccgtggtgtgaataactcttacatacagcgaagtgaacatccacttgcccagctttactgccattcaatcatggaacaccatcattttgaccagtgcctgatgattcttaatagtccaggcaatcagattctcagtggcctctccattgaagaatataagaccacgttgaaaataatcaagcaagctattttagctacagacctagcactgtacattaagaggcgaggagaatttgctgaacttataagaaaaaatcaattcaatttggaagatcctcatcaaaaggagttgtttttggcaatgctgatgacagcttgtgatctttctgcaattacaaaaccctggcctattcaacaacggatagcagaacttgtagcaactgaattttttgatcaaggagacagagagagaaaagaactcaacatagaacccactgatctaatgaacagggagaagaaaaacaaaatcccaagtatgcaagttgggttcatagatgccatctgcttgcaactgtatgaggccctgacccacgtgtcagaggactgtttccctttgctagatggctgcagaaagaacaggcagaaatggcaggcccttgcagaacagcagtga

SEQ ID NO: 8672 - DNA, 2175 bp, Artificial Sequence
  source: /note="Description of Artificial Sequence: Synthetic Construct"
atggactggacctggattctgtttctggtggccgctgccacaagagtgcacagcaattgggtcaacgtgatcagcgacctgaagaagatcgaggacctgatccagagcatgcacatcgacgccacactgtacaccgagtccgatgtgcaccctagctgcaaagtgaccgccatgaagtgctttctgctggaactgcaagtgatcagcctggaaagcggcgacgccagcatccacgataccgtggaaaatctgatcatcctggccaacaacagcctgagcagcaacggcaatgtgaccgagagcggctgcaaagagtgcgaggaactggaagagaagaacatcaaagagttcctccagagcttcgtccacatcgtgcagatgttcatcaacaccagctctggcggaggaagcggaggcggaggatctggtggtggtggatctggcggcggtggtagtggcggaggttctctgcaaatcacctgtcctccacctatgagcgtggaacacgccgacatctgggtcaagagctacagcctgtacagcagagagcggtacatctgcaacagcggcttcaagagaaaggccggcacaagcagcctgaccgagtgtgtgctgaacaaggccacaaacgtggcccactggaccacacctagcctgaagtgcatcagagatcccgctctggttcaccagaggcctgctcctccatctacagtgacaacagctggcgtgacccctcagcctgagtctctgtctccatctggaaaagagcctgccgccagctctcccagctctaacaatactgctgccaccacagccgccatcgtgcctggatctcagctgatgcctagcaagagccctagcaccggcacaacagagatcagctctcacgagtctagccacggcaccccatctcagaccacagccaagaattgggagctgaccgcctctgcctctcatcagccacctggtgtttaccctcaaggccactctgataccaccgtggccatcagcacaagcacagtgctgctgtgtggactgtctgccgtgtctctgctggcctgctacctgaagtctagacagacacctcctctggccagcgtggaaatggaagccatggaagctctgcctgtgacatggggcaccagcagcagagatgaggacctcgagaattgcagccaccacctgggatccggtgaagaaacaagagagctacagtcgttagcggctgctgtggtgccatctgcccagacccttaaaattactgactttagcttcagtgactttgagctgtctgatctggaaacagcactgtgtacaattcggatgtttactgacctcaaccttgtgcagaacttccagatgaaacatgaggttctttgcagatggattttaagtgttaagaagaattatcggaagaatgttgcctatcataattggagacatgcctttaatacagctcagtgcatgtttgctgctctaaaagcaggcaaaattcagaacaagctgactgacctggagatacttgcattgctgattgctgcactaagccacgatttggatcaccgtggtgtgaataactcttacatacagcgaagtgaacatccacttgcccagctttactgccattcaatcatggaacaccatcattttgaccagtgcctgatgattcttaatagtccaggcaatcagattctcagtggcctctccattgaagaatataagaccacgttgaaaataatcaagcaagctattttagctacagacctagcactgtacattaagaggctaggagaatttgctgaacttataagaaaaaatcaattcaatttggaagatcctcatcaaaaggagttgtttttggcaatgctgatgacagcttgtgatctttctgcaattacaaaaccctggcctattcaacaacggatagcagaacttgtagcaactgaattttttgatcaaggagacagagagagaaaagaactcaacatagaacccactgatctaatgaacagggagaagaaaaacaaaatcccaagtatgcaagttgggttcatagatgccatctgcttgcaactgtatgaggccctgacccacgtgtcagaggactgtttccctttgctagatggctgcagaaagaacaggcagaaatggcaggcccttgcagaacagcagtag

SEQ ID NO: 8673 - DNA, 2175 bp, Artificial Sequence
  source: /note="Description of Artificial Sequence: Synthetic Construct"
atggactggacctggattctgtttctggtggccgctgccacaagagtgcacagcaattgggtcaacgtgatcagcgacctgaagaagatcgaggacctgatccagagcatgcacatcgacgccacactgtacaccgagtccgatgtgcaccctagctgcaaagtgaccgccatgaagtgctttctgctggaactgcaagtgatcagcctggaaagcggcgacgccagcatccacgataccgtggaaaatctgatcatcctggccaacaacagcctgagcagcaacggcaatgtgaccgagagcggctgcaaagagtgcgaggaactggaagagaagaacatcaaagagttcctccagagcttcgtccacatcgtgcagatgttcatcaacaccagctctggcggaggaagcggaggcggaggatctggtggtggtggatctggcggcggtggtagtggcggaggttctctgcaaatcacctgtcctccacctatgagcgtggaacacgccgacatctgggtcaagagctacagcctgtacagcagagagcggtacatctgcaacagcggcttcaagagaaaggccggcacaagcagcctgaccgagtgtgtgctgaacaaggccacaaacgtggcccactggaccacacctagcctgaagtgcatcagagatcccgctctggttcaccagaggcctgctcctccatctacagtgacaacagctggcgtgacccctcagcctgagtctctgtctccatctggaaaagagcctgccgccagctctcccagctctaacaatactgctgccaccacagccgccatcgtgcctggatctcagctgatgcctagcaagagccctagcaccggcacaacagagatcagctctcacgagtctagccacggcaccccatctcagaccacagccaagaattgggagctgaccgcctctgcctctcatcagccacctggtgtttaccctcaaggccactctgataccaccgtggccatcagcacaagcacagtgctgctgtgtggactgtctgccgtgtctctgctggcctgctacctgaagtctagacagacacctcctctggccagcgtggaaatggaagccatggaagctctgcctgtgacatggggcaccagcagcagagatgaggacctcgagaattgcagccaccacctgggatccggtgaagaaacaagagagctacagtcgttagcggctgctgtggtgccatctgcccagacccttaaaattactgactttagcttcagtgactttgagctgtctgatctggaaacagcactgtgtacaattcggatgtttactgacctcaaccttgtgcagaacttccagatgaaacatgaggttctttgcagatggattttaagtgttaagaagaattatcggaagaatgttgcctatcataattggagacatgcctttaatacagctcagtgcatgtttgctgctctaaaagcaggcaaaattcagaacaagctgactgacctggagatacttgcattgctgattgctgcactaagccacgatttggatcaccgtggtgtgaataactcttacatacagcgaagtgaacatccacttgcccagctttactgccattcaatcatggaacaccatcattttgaccagtgcctgatgattcttaatagtccaggcaatcagattctcagtggcctctccattgaagaatataagaccacgttgaaaataatcaagcaagctattttagctacagacctagcactgtacattaagaggcgaggagaattttttgaacttataagaaaaaatcaattcaatttggaagatcctcatcaaaaggagttgtttttggcaatgctgatgacagcttgtgatctttctgcaattacaaaaccctggcctattcaacaacggatagcagaacttgtagcaactgaattttttgatcaaggagacagagagagaaaagaactcaacatagaacccactgatctaatgaacagggagaagaaaaacaaaatcccaagtatgcaagttgggttcatagatgccatctgcttgcaactgtatgaggccctgacccacgtgtcagaggactgtttccctttgctagatggctgcagaaagaacaggcagaaatggcaggcccttgcagaacagcagtag

SEQ ID NO: 8674 - DNA, 1245 bp, Artificial Sequence
  source: /note="Description of Artificial Sequence: Synthetic Construct"
atggactggacatggatactcttcctggtagcagccgccacacgagtgcacagcgactacaaagacgatgacgacaagaactgggtgaacgtgatctccgacctgaaaaagatcgaggatttgatccagagcatgcacattgacgccaccctgtataccgagtccgacgtgcacccgagttgcaaggtgactgccatgaagtgcttcctgctggagctgcaagtgatcagcctggagagcggcgacgccagcatccacgacaccgtggaaaaccttatcattctggccaacaatagcctgagcagcaacggcaacgtgaccgaaagcggatgtaaggaatgcgaggaactggaagagaagaatatcaaagaattcctgcaaagcttcgtgcacatcgtgcagatgttcatcaacacttcttcaggtggcggtagtggtgggggaggatctggaggcggaggaagcgggggtggaggttcaggtggaggcagcttgcaatacccatacgatgttccagattacgctattacctgcccccctccgatgagcgtggagcacgccgacatctgggtcaagagctacagcttgtatagtagggagcggtacatctgtaacagcgggttcaagaggaaggccgggaccagctcactgaccgagtgcgtgttgaacaaggccaccaacgtggcccactggaccacccctagccttaagtgcatcagggacccagcgctcgtacaccagagacccgcgcctccctctacggtaaccacggcaggcgtaaccccccagcccgagagcctgtccccgagcggcaaggagcctgcagcgagcagcccctcaagcaacaacacagccgctaccaccgcggcaatcgtgcccggcagccagctgatgccctcaaagagccccagcaccggcaccactgagataagcagccacgagagctcacacggcactccctcacagaccactgccaagaattgggagctgaccgcctctgccagccaccagcccccaggcgtgtatccccagggccacagcgacaccacggtcgccatcagcacatctacagtgcttttgtgcggccttagcgccgtgtcactgctggcatgctacttgaaaagtaggcaaactccccctcttgccagtgtggaaatggaggccatggaagccctgcccgtgacctggggcaccagttctagggacgaggaccttgagaactgctcacatcatttgggatcctga

SEQ ID NO: 8675 - DNA, 2226 bp, Artificial Sequence
  source: /note="Description of Artificial Sequence: Synthetic Construct"
atggactggacatggatactcttcctggtagcagccgccacacgagtgcacagcgactacaaagacgatgacgacaagaactgggtgaacgtgatctccgacctgaaaaagatcgaggatttgatccagagcatgcacattgacgccaccctgtataccgagtccgacgtgcacccgagttgcaaggtgactgccatgaagtgcttcctgctggagctgcaagtgatcagcctggagagcggcgacgccagcatccacgacaccgtggaaaaccttatcattctggccaacaatagcctgagcagcaacggcaacgtgaccgaaagcggatgtaaggaatgcgaggaactggaagagaagaatatcaaagaattcctgcaaagcttcgtgcacatcgtgcagatgttcatcaacacttcttcaggtggcggtagtggtgggggaggatctggaggcggaggaagcgggggtggaggttcaggtggaggcagcttgcaatacccatacgatgttccagattacgctattacctgcccccctccgatgagcgtggagcacgccgacatctgggtcaagagctacagcttgtatagtagggagcggtacatctgtaacagcgggttcaagaggaaggccgggaccagctcactgaccgagtgcgtgttgaacaaggccaccaacgtggcccactggaccacccctagccttaagtgcatcagggacccagcgctcgtacaccagagacccgcgcctccctctacggtaaccacggcaggcgtaaccccccagcccgagagcctgtccccgagcggcaaggagcctgcagcgagcagcccctcaagcaacaacacagccgctaccaccgcggcaatcgtgcccggcagccagctgatgccctcaaagagccccagcaccggcaccactgagataagcagccacgagagctcacacggcactccctcacagaccactgccaagaattgggagctgaccgcctctgccagccaccagcccccaggcgtgtatccccagggccacagcgacaccacggtcgccatcagcacatctacagtgcttttgtgcggccttagcgccgtgtcactgctggcatgctacttgaaaagtaggcaaactccccctcttgccagtgtggaaatggaggccatggaagccctgcccgtgacctggggcaccagttctagggacgaggaccttgagaactgctcacatcatttgggatccggtgaagaaacaagagagctacagtcgttagcggctgctgtggtgccatctgcccagacccttaaaattactgactttagcttcagtgactttgagctgtctgatctggaaacagcactgtgtacaattcggatgtttactgacctcaaccttgtgcagaacttccagatgaaacatgaggttctttgcagatggattttaagtgttaagaagaattatcggaagaatgttgcctatcataattggagacatgcctttaatacagctcagtgcatgtttgctgctctaaaagcaggcaaaattcagaacaagctgactgacctggagatacttgcattgctgattgctgcactaagccacgatttggatcaccgtggtgtgaataactcttacatacagcgaagtgaacatccacttgcccagctttactgccattcaatcatggaacaccatcattttgaccagtgcctgatgattcttaatagtccaggcaatcagattctcagtggcctctccattgaagaatataagaccacgttgaaaataatcaagcaagctattttagctacagacctagcactgtacattaagaggcgaggagaattttttgaacttataagaaaaaatcaattcaatttggaagatcctcatcaaaaggagttgtttttggcaatgctgatgacagcttgtgatctttctgcaattacaaaaccctggcctattcaacaacggatagcagaacttgtagcaactgaattttttgatcaaggagacagagagagaaaagaactcaacatagaacccactgatctaatgaacagggagaagaaaaacaaaatcccaagtatgcaagttgggttcatagatgccatctgcttgcaactgtatgaggccctgacccacgtgtcagaggactgtttccctttgctagatggctgcagaaagaacaggcagaaatggcaggcccttgcagaacagcagtga

SEQ ID NO: 8676 - DNA, 2226 bp, Artificial Sequence
  source: /note="Description of Artificial Sequence: Synthetic Construct"
atggactggacatggatactcttcctggtagcagccgccacacgagtgcacagcgactacaaagacgatgacgacaagaactgggtgaacgtgatctccgacctgaaaaagatcgaggatttgatccagagcatgcacattgacgccaccctgtataccgagtccgacgtgcacccgagttgcaaggtgactgccatgaagtgcttcctgctggagctgcaagtgatcagcctggagagcggcgacgccagcatccacgacaccgtggaaaaccttatcattctggccaacaatagcctgagcagcaacggcaacgtgaccgaaagcggatgtaaggaatgcgaggaactggaagagaagaatatcaaagaattcctgcaaagcttcgtgcacatcgtgcagatgttcatcaacacttcttcaggtggcggtagtggtgggggaggatctggaggcggaggaagcgggggtggaggttcaggtggaggcagcttgcaatacccatacgatgttccagattacgctattacctgcccccctccgatgagcgtggagcacgccgacatctgggtcaagagctacagcttgtatagtagggagcggtacatctgtaacagcgggttcaagaggaaggccgggaccagctcactgaccgagtgcgtgttgaacaaggccaccaacgtggcccactggaccacccctagccttaagtgcatcagggacccagcgctcgtacaccagagacccgcgcctccctctacggtaaccacggcaggcgtaaccccccagcccgagagcctgtccccgagcggcaaggagcctgcagcgagcagcccctcaagcaacaacacagccgctaccaccgcggcaatcgtgcccggcagccagctgatgccctcaaagagccccagcaccggcaccactgagataagcagccacgagagctcacacggcactccctcacagaccactgccaagaattgggagctgaccgcctctgccagccaccagcccccaggcgtgtatccccagggccacagcgacaccacggtcgccatcagcacatctacagtgcttttgtgcggccttagcgccgtgtcactgctggcatgctacttgaaaagtaggcaaactccccctcttgccagtgtggaaatggaggccatggaagccctgcccgtgacctggggcaccagttctagggacgaggaccttgagaactgctcacatcatttgggatccggtgaagaaacaagagagctacagtcgttagcggctgctgtggtgccatctgcccagacccttaaaattactgactttagcttcagtgactttgagctgtctgatctggaaacagcactgtgtacaattcggatgtttactgacctcaaccttgtgcagaacttccagatgaaacatgaggttctttgcagatggattttaagtgttaagaagaattatcggaagaatgttgcctatcataattggagacatgcctttaatacagctcagtgcatgtttgctgctctaaaagcaggcaaaattcagaacaagctgactgacctggagatacttgcattgctgattgctgcactaagccacgatttggatcaccgtggtgtgaataactcttacatacagcgaagtgaacatccacttgcccagctttactgccattcaatcatggaacaccatcattttgaccagtgcctgatgattcttaatagtccaggcaatcagattctcagtggcctctccattgaagaatataagaccacgttgaaaataatcaagcaagctattttagctacagacctagcactgtacattaagaggcgaggagaatttgctgaacttataagaaaaaatcaattcaatttggaagatcctcatcaaaaggagttgtttttggcaatgctgatgacagcttgtgatctttctgcaattacaaaaccctggcctattcaacaacggatagcagaacttgtagcaactgaattttttgatcaaggagacagagagagaaaagaactcaacatagaacccactgatctaatgaacagggagaagaaaaacaaaatcccaagtatgcaagttgggttcatagatgccatctgcttgcaactgtatgaggccctgacccacgtgtcagaggactgtttccctttgctagatggctgcagaaagaacaggcagaaatggcaggcccttgcagaacagcagtga

SEQ ID NO: 8677 - DNA, 2226 bp, Artificial Sequence
  source: /note="Description of Artificial Sequence: Synthetic Construct"
atggactggacatggatactcttcctggtagcagccgccacacgagtgcacagcgactacaaagacgatgacgacaagaactgggtgaacgtgatctccgacctgaaaaagatcgaggatttgatccagagcatgcacattgacgccaccctgtataccgagtccgacgtgcacccgagttgcaaggtgactgccatgaagtgcttcctgctggagctgcaagtgatcagcctggagagcggcgacgccagcatccacgacaccgtggaaaaccttatcattctggccaacaatagcctgagcagcaacggcaacgtgaccgaaagcggatgtaaggaatgcgaggaactggaagagaagaatatcaaagaattcctgcaaagcttcgtgcacatcgtgcagatgttcatcaacacttcttcaggtggcggtagtggtgggggaggatctggaggcggaggaagcgggggtggaggttcaggtggaggcagcttgcaatacccatacgatgttccagattacgctattacctgcccccctccgatgagcgtggagcacgccgacatctgggtcaagagctacagcttgtatagtagggagcggtacatctgtaacagcgggttcaagaggaaggccgggaccagctcactgaccgagtgcgtgttgaacaaggccaccaacgtggcccactggaccacccctagccttaagtgcatcagggacccagcgctcgtacaccagagacccgcgcctccctctacggtaaccacggcaggcgtaaccccccagcccgagagcctgtccccgagcggcaaggagcctgcagcgagcagcccctcaagcaacaacacagccgctaccaccgcggcaatcgtgcccggcagccagctgatgccctcaaagagccccagcaccggcaccactgagataagcagccacgagagctcacacggcactccctcacagaccactgccaagaattgggagctgaccgcctctgccagccaccagcccccaggcgtgtatccccagggccacagcgacaccacggtcgccatcagcacatctacagtgcttttgtgcggccttagcgccgtgtcactgctggcatgctacttgaaaagtaggcaaactccccctcttgccagtgtggaaatggaggccatggaagccctgcccgtgacctggggcaccagttctagggacgaggaccttgagaactgctcacatcatttgggatccggtgaagaaacaagagagctacagtcgttagcggctgctgtggtgccatctgcccagacccttaaaattactgactttagcttcagtgactttgagctgtctgatctggaaacagcactgtgtacaattcggatgtttactgacctcaaccttgtgcagaacttccagatgaaacatgaggttctttgcagatggattttaagtgttaagaagaattatcggaagaatgttgcctatcataattggagacatgcctttaatacagctcagtgcatgtttgctgctctaaaagcaggcaaaattcagaacaagctgactgacctggagatacttgcattgctgattgctgcactaagccacgatttggatcaccgtggtgtgaataactcttacatacagcgaagtgaacatccacttgcccagctttactgccattcaatcatggaacaccatcattttgaccagtgcctgatgattcttaatagtccaggcaatcagattctcagtggcctctccattgaagaatataagaccacgttgaaaataatcaagcaagctattttagctacagacctagcactgtacattaagaggctaggagaattttttgaacttataagaaaaaatcaattcaatttggaagatcctcatcaaaaggagttgtttttggcaatgctgatgacagcttgtgatctttctgcaattacaaaaccctggcctattcaacaacggatagcagaacttgtagcaactgaattttttgatcaaggagacagagagagaaaagaactcaacatagaacccactgatctaatgaacagggagaagaaaaacaaaatcccaagtatgcaagttgggttcatagatgccatctgcttgcaactgtatgaggccctgacccacgtgtcagaggactgtttccctttgctagatggctgcagaaagaacaggcagaaatggcaggcccttgcagaacagcagtga

SEQ ID NO: 8678 - DNA, 2226 bp, Artificial Sequence
  source: /note="Description of Artificial Sequence: Synthetic Construct"
atggactggacatggatactcttcctggtagcagccgccacacgagtgcacagcgactacaaagacgatgacgacaagaactgggtgaacgtgatctccgacctgaaaaagatcgaggatttgatccagagcatgcacattgacgccaccctgtataccgagtccgacgtgcacccgagttgcaaggtgactgccatgaagtgcttcctgctggagctgcaagtgatcagcctggagagcggcgacgccagcatccacgacaccgtggaaaaccttatcattctggccaacaatagcctgagcagcaacggcaacgtgaccgaaagcggatgtaaggaatgcgaggaactggaagagaagaatatcaaagaattcctgcaaagcttcgtgcacatcgtgcagatgttcatcaacacttcttcaggtggcggtagtggtgggggaggatctggaggcggaggaagcgggggtggaggttcaggtggaggcagcttgcaatacccatacgatgttccagattacgctattacctgcccccctccgatgagcgtggagcacgccgacatctgggtcaagagctacagcttgtatagtagggagcggtacatctgtaacagcgggttcaagaggaaggccgggaccagctcactgaccgagtgcgtgttgaacaaggccaccaacgtggcccactggaccacccctagccttaagtgcatcagggacccagcgctcgtacaccagagacccgcgcctccctctacggtaaccacggcaggcgtaaccccccagcccgagagcctgtccccgagcggcaaggagcctgcagcgagcagcccctcaagcaacaacacagccgctaccaccgcggcaatcgtgcccggcagccagctgatgccctcaaagagccccagcaccggcaccactgagataagcagccacgagagctcacacggcactccctcacagaccactgccaagaattgggagctgaccgcctctgccagccaccagcccccaggcgtgtatccccagggccacagcgacaccacggtcgccatcagcacatctacagtgcttttgtgcggccttagcgccgtgtcactgctggcatgctacttgaaaagtaggcaaactccccctcttgccagtgtggaaatggaggccatggaagccctgcccgtgacctggggcaccagttctagggacgaggaccttgagaactgctcacatcatttgggatccggtgaagaaacaagagagctacagtcgttagcggctgctgtggtgccatctgcccagacccttaaaattactgactttagcttcagtgactttgagctgtctgatctggaaacagcactgtgtacaattcggatgtttactgacctcaaccttgtgcagaacttccagatgaaacatgaggttctttgcagatggattttaagtgttaagaagaattatcggaagaatgttgcctatcataattggagacatgcctttaatacagctcagtgcatgtttgctgctctaaaagcaggcaaaattcagaacaagctgactgacctggagatacttgcattgctgattgctgcactaagccacgatttggatcaccgtggtgtgaataactcttacatacagcgaagtgaacatccacttgcccagctttactgccattcaatcatggaacaccatcattttgaccagtgcctgatgattcttaatagtccaggcaatcagattctcagtggcctctccattgaagaatataagaccacgttgaaaataatcaagcaagctattttagctacagacctagcactgtacattaagaggctaggagaatttgctgaacttataagaaaaaatcaattcaatttggaagatcctcatcaaaaggagttgtttttggcaatgctgatgacagcttgtgatctttctgcaattacaaaaccctggcctattcaacaacggatagcagaacttgtagcaactgaattttttgatcaaggagacagagagagaaaagaactcaacatagaacccactgatctaatgaacagggagaagaaaaacaaaatcccaagtatgcaagttgggttcatagatgccatctgcttgcaactgtatgaggccctgacccacgtgtcagaggactgtttccctttgctagatggctgcagaaagaacaggcagaaatggcaggcccttgcagaacagcagtga

SEQ ID NO: 8679 - DNA, 2268 bp, Artificial Sequence
  source: /note="Description of Artificial Sequence: Synthetic Construct"
atggactggacatggatactcttcctggtagcagccgccacacgagtgcacagcgactacaaagacgatgacgacaagaactgggtgaacgtgatctccgacctgaaaaagatcgaggatttgatccagagcatgcacattgacgccaccctgtataccgagtccgacgtgcacccgagttgcaaggtgactgccatgaagtgcttcctgctggagctgcaagtgatcagcctggagagcggcgacgccagcatccacgacaccgtggaaaaccttatcattctggccaacaatagcctgagcagcaacggcaacgtgaccgaaagcggatgtaaggaatgcgaggaactggaagagaagaatatcaaagaattcctgcaaagcttcgtgcacatcgtgcagatgttcatcaacacttcttcaggtggcggtagtggtgggggaggatctggaggcggaggaagcgggggtggaggttcaggtggaggcagcttgcaatacccatacgatgttccagattacgctattacctgcccccctccgatgagcgtggagcacgccgacatctgggtcaagagctacagcttgtatagtagggagcggtacatctgtaacagcgggttcaagaggaaggccgggaccagctcactgaccgagtgcgtgttgaacaaggccaccaacgtggcccactggaccacccctagccttaagtgcatcagggacccagcgctcgtacaccagagacccgcgcctccctctacggtaaccacggcaggcgtaaccccccagcccgagagcctgtccccgagcggcaaggagcctgcagcgagcagcccctcaagcaacaacacagccgctaccaccgcggcaatcgtgcccggcagccagctgatgccctcaaagagccccagcaccggcaccactgagataagcagccacgagagctcacacggcactccctcacagaccactgccaagaattgggagctgaccgcctctgccagccaccagcccccaggcgtgtatccccagggccacagcgacaccacggtcgccatcagcacatctacagtgcttttgtgcggccttagcgccgtgtcactgctggcatgctacttgaaaagtaggcaaactccccctcttgccagtgtggaaatggaggccatggaagccctgcccgtgacctggggcaccagttctagggacgaggaccttgagaactgctcacatcatttgggatccggtgaagaaacaagagagctacagtcgttagcggctgctgtggtgccatctgcccagacccttaaaattactgactttagcttcagtgactttgagctgtctgatctggaaacagcactgtgtacaattcggatgtttactgacctcaaccttgtgcagaacttccagatgaaacatgaggttctttgcagatggattttaagtgttaagaagaattatcggaagaatgttgcctatcataattggagacatgcctttaatacagctcagtgcatgtttgctgctctaaaagcaggcaaaattcagaacaagctgactgacctggagatacttgcattgctgattgctgcactaagccacgatttggatcaccgtggtgtgaataactcttacatacagcgaagtgaacatccacttgcccagctttactgccattcaatcatggaacaccatcattttgaccagtgcctgatgattcttaatagtccaggcaatcagattctcagtggcctctccattgaagaatataagaccacgttgaaaataatcaagcaagctattttagctacagacctagcactgtacattaagaggctaggagaattttttgaacttataagaaaaaatcaattcaatttggaagatcctcatcaaaaggagttgtttttggcaatgctgatgacagcttgtgatctttctgcaattacaaaaccctggcctattcaacaacggatagcagaacttgtagcaactgaattttttgatcaaggagacagagagagaaaagaactcaacatagaacccactgatctaatgaacagggagaagaaaaacaaaatcccaagtatgcaagttgggttcatagatgccatctgcttgcaactgtatgaggccctgacccacgtgtcagaggactgtttccctttgctagatggctgcagaaagaacaggcagaaatggcaggcccttgcagaacagcagggtaagcctatccctaaccctctcctcggtctcgattctacgtga

SEQ ID NO: 8680 - DNA, 2181 bp, Artificial Sequence
  source: /note="Description of Artificial Sequence: Synthetic Construct"
atggactggacatggatactcttcctggtagcagccgccacacgagtgcacagcaactgggtgaacgtgatctccgacctgaaaaagatcgaggatttgatccagagcatgcacattgacgccaccctgtataccgagtccgacgtgcacccgagttgcaaggtgactgccatgaagtgcttcctgctggagctgcaagtgatcagcctggagagcggcgacgccagcatccacgacaccgtggaaaaccttatcattctggccaacaatagcctgagcagcaacggcaacgtgaccgaaagcggatgtaaggaatgcgaggaactggaagagaagaatatcaaagaattcctgcaaagcttcgtgcacatcgtgcagatgttcatcaacacttcttcaggtggcggtagtggtgggggaggatctggaggcggaggaagcgggggtggaggttcaggaggagggagcttgcaaattacctgcccccctccgatgagcgtggagcacgccgacatctgggtcaagagctacagcttgtatagtagggagcggtacatctgtaacagcgggttcaagaggaaggccgggaccagctcactgaccgagtgcgtgttgaacaaggccaccaacgtggcccactggaccacccctagccttaagtgcatcagggacccagcgctcgtacaccagagacccgcgcctccctctacggtaaccacggcaggcgtaaccccccagcccgagagcctgtccccgagcggcaaggagcctgcagcgagcagcccctcaagcaacaacacagccgctaccaccgcggcaatcgtgcccggcagccagctgatgccctcaaagagccccagcaccggcaccactgagataagcagccacgagagctcacacggcactccctcacagaccactgccaagaattgggagctgaccgcctctgccagccaccagcccccaggcgtgtatccccagggccacagcgacaccacggtcgccatcagcacatctacagtgcttttgtgcggccttagcgccgtgtcactgctggcatgctacttgaaaagtaggcaaactccccctcttgccagtgtggaaatggaggccatggaagccctgcccgtgacctggggcaccagttctagggacgaggaccttgagaactgctcacatcatttgggatctggtgaagaaacaagagagctacagtcgttagcggctgctgtggtgccatctgcccagacccttaaaattactgactttagcttcagtgactttgagctgtctgatctggaaacagcactgtgtacaattcggatgtttactgacctcaaccttgtgcagaacttccagatgaaacatgaggttctttgcagatggattttaagtgttaagaagaattatcggaagaatgttgcctatcataattggagacatgcctttaatacagctcagtgcatgtttgctgctctaaaagcaggcaaaattcagaacaagctgactgacctggagatacttgcattgctgattgctgcactaagccacgatttggatcaccgtggtgtgaataactcttacatacagcgaagtgaacatccacttgcccagctttactgccattcaatcatggaacaccatcattttgaccagtgcctgatgattcttaatagtccaggcaatcagattctcagtggcctctccattgaagaatataagaccacgttgaaaataatcaagcaagctattttagctacagacctagcactgtacattaagaggctaggagaattttttgaacttataagaaaaaatcaattcaatttggaagatcctcatcaaaaggagttgtttttggcaatgctgatgacagcttgtgatctttctgcaattacaaaaccctggcctattcaacaacggatagcagaacttgtagcaactgaattttttgatcaaggagacagagagagaaaagaactcaacatagaacccactgatctaatgaacagggagaagaaaaacaaaatcccaagtatgcaagttgggttcatagatgccatctgcttgcaactgtatgaggccctgacccacgtgtcagaggactgtttccctttgctagatggctgcagaaagaacaggcagaaatggcaggcccttgcagaacagcagggatcctga

SEQ ID NO: 8681 - DNA, 2181 bp, Artificial Sequence
  source: /note="Description of Artificial Sequence: Synthetic Construct"
atggactggacatggatactcttcctggtagcagccgccacacgagtgcacagcaactgggtgaacgtgatctccgacctgaaaaagatcgaggatttgatccagagcatgcacattgacgccaccctgtataccgagtccgacgtgcacccgagttgcaaggtgactgccatgaagtgcttcctgctggagctgcaagtgatcagcctggagagcggcgacgccagcatccacgacaccgtggaaaaccttatcattctggccaacaatagcctgagcagcaacggcaacgtgaccgaaagcggatgtaaggaatgcgaggaactggaagagaagaatatcaaagaattcctgcaaagcttcgtgcacatcgtgcagatgttcatcaacacttcttcaggtggcggtagtggtgggggaggatctggaggcggaggaagcgggggtggaggttcaggaggagggagcttgcaaattacctgcccccctccgatgagcgtggagcacgccgacatctgggtcaagagctacagcttgtatagtagggagcggtacatctgtaacagcgggttcaagaggaaggccgggaccagctcactgaccgagtgcgtgttgaacaaggccaccaacgtggcccactggaccacccctagccttaagtgcatcagggacccagcgctcgtacaccagagacccgcgcctccctctacggtaaccacggcaggcgtaaccccccagcccgagagcctgtccccgagcggcaaggagcctgcagcgagcagcccctcaagcaacaacacagccgctaccaccgcggcaatcgtgcccggcagccagctgatgccctcaaagagccccagcaccggcaccactgagataagcagccacgagagctcacacggcactccctcacagaccactgccaagaattgggagctgaccgcctctgccagccaccagcccccaggcgtgtatccccagggccacagcgacaccacggtcgccatcagcacatctacagtgcttttgtgcggccttagcgccgtgtcactgctggcatgctacttgaaaagtaggcaaactccccctcttgccagtgtggaaatggaggccatggaagccctgcccgtgacctggggcaccagttctagggacgaggaccttgagaactgctcacatcatttgggatctggtgaagaaacaagagagctacagtcgttagcggctgctgtggtgccatctgcccagacccttaaaattactgactttagcttcagtgactttgagctgtctgatctggaaacagcactgtgtacaattcggatgtttactgacctcaaccttgtgcagaacttccagatgaaacatgaggttctttgcagatggattttaagtgttaagaagaattatcggaagaatgttgcctatcataattggagacatgcctttaatacagctcagtgcatgtttgctgctctaaaagcaggcaaaattcagaacaagctgactgacctggagatacttgcattgctgattgctgcactaagccacgatttggatcaccgtggtgtgaataactcttacatacagcgaagtgaacatccacttgcccagctttactgccattcaatcatggaacaccatcattttgaccagtgcctgatgattcttaatagtccaggcaatcagattctcagtggcctctccattgaagaatataagaccacgttgaaaataatcaagcaagctattttagctacagacctagcactgtacattaagaggataggagaattttttgaacttataagaaaaaatcaattcaatttggaagatcctcatcaaaaggagttgtttttggcaatgctgatgacagcttgtgatctttctgcaattacaaaaccctggcctattcaacaacggatagcagaacttgtagcaactgaattttttgatcaaggagacagagagagaaaagaactcaacatagaacccactgatctaatgaacagggagaagaaaaacaaaatcccaagtatgcaagttgggttcatagatgccatctgcttgcaactgtatgaggccctgacccacgtgtcagaggactgtttccctttgctagatggctgcagaaagaacaggcagaaatggcaggcccttgcagaacagcagggatcctga

SEQ ID NO: 8682 - DNA, 2181 bp, Artificial Sequence
  source: /note="Description of Artificial Sequence: Synthetic Construct"
atggactggacatggatactcttcctggtagcagccgccacacgagtgcacagcaactgggtgaacgtgatctccgacctgaaaaagatcgaggatttgatccagagcatgcacattgacgccaccctgtataccgagtccgacgtgcacccgagttgcaaggtgactgccatgaagtgcttcctgctggagctgcaagtgatcagcctggagagcggcgacgccagcatccacgacaccgtggaaaaccttatcattctggccaacaatagcctgagcagcaacggcaacgtgaccgaaagcggatgtaaggaatgcgaggaactggaagagaagaatatcaaagaattcctgcaaagcttcgtgcacatcgtgcagatgttcatcaacacttcttcaggtggcggtagtggtgggggaggatctggaggcggaggaagcgggggtggaggttcaggaggagggagcttgcaaattacctgcccccctccgatgagcgtggagcacgccgacatctgggtcaagagctacagcttgtatagtagggagcggtacatctgtaacagcgggttcaagaggaaggccgggaccagctcactgaccgagtgcgtgttgaacaaggccaccaacgtggcccactggaccacccctagccttaagtgcatcagggacccagcgctcgtacaccagagacccgcgcctccctctacggtaaccacggcaggcgtaaccccccagcccgagagcctgtccccgagcggcaaggagcctgcagcgagcagcccctcaagcaacaacacagccgctaccaccgcggcaatcgtgcccggcagccagctgatgccctcaaagagccccagcaccggcaccactgagataagcagccacgagagctcacacggcactccctcacagaccactgccaagaattgggagctgaccgcctctgccagccaccagcccccaggcgtgtatccccagggccacagcgacaccacggtcgccatcagcacatctacagtgcttttgtgcggccttagcgccgtgtcactgctggcatgctacttgaaaagtaggcaaactccccctcttgccagtgtggaaatggaggccatggaagccctgcccgtgacctggggcaccagttctagggacgaggaccttgagaactgctcacatcatttgggatctggtgaagaaacaagagagctacagtcgttagcggctgctgtggtgccatctgcccagacccttaaaattactgactttagcttcagtgactttgagctgtctgatctggaaacagcactgtgtacaattcggatgtttactgacctcaaccttgtgcagaacttccagatgaaacatgaggttctttgcagatggattttaagtgttaagaagaattatcggaagaatgttgcctatcataattggagacatgcctttaatacagctcagtgcatgtttgctgctctaaaagcaggcaaaattcagaacaagctgactgacctggagatacttgcattgctgattgctgcactaagccacgatttggatcaccgtggtgtgaataactcttacatacagcgaagtgaacatccacttgcccagctttactgccattcaatcatggaacaccatcattttgaccagtgcctgatgattcttaatagtccaggcaatcagattctcagtggcctctccattgaagaatataagaccacgttgaaaataatcaagcaagctattttagctacagacctagcactgtacattaagaggggaggagaattttttgaacttataagaaaaaatcaattcaatttggaagatcctcatcaaaaggagttgtttttggcaatgctgatgacagcttgtgatctttctgcaattacaaaaccctggcctattcaacaacggatagcagaacttgtagcaactgaattttttgatcaaggagacagagagagaaaagaactcaacatagaacccactgatctaatgaacagggagaagaaaaacaaaatcccaagtatgcaagttgggttcatagatgccatctgcttgcaactgtatgaggccctgacccacgtgtcagaggactgtttccctttgctagatggctgcagaaagaacaggcagaaatggcaggcccttgcagaacagcagggatcctga

SEQ ID NO: 8683 - DNA, 2711 bp, Artificial Sequence
  source: /note="Description of Artificial Sequence: Synthetic Construct"
atggactggacatggatactcttcctggtagcagccgccacacgagtgcacagcaactgggtgaatgtaataagtgatttgaaaaaaattgaagatcttattcaatctatgcatattgatgctactttatatacggaaagtgatgttcaccccagttgcaaagtaacagcaatgaagtgctttctcttggagttacaagttatttcacttgagtccggagatgcaagtattcatgatacagtagaaaatctgatcatcctagcaaacaacagtttgtcttctaatgggaatgtaacagaatctggatgcaaagaatgtgaggaactggaggaaaaaaatattaaagaatttttgcagagttttgtacatattgtccaaatgttcatcaacacttctggttccgaagaaacaagagagctacagtcgttagcggctgctgtggtgccatctgcccagacccttaaaattactgactttagcttcagtgactttgagctgtctgatctggaaacagcactgtgtacaattcggatgtttactgacctcaaccttgtgcagaacttccagatgaaacatgaggttctttgcagatggattttaagtgttaagaagaattatcggaagaatgttgcctatcataattggagacatgcctttaatacagctcagtgcatgtttgctgctctaaaagcaggcaaaattcagaacaagctgactgacctggagatacttgcattgctgattgctgcactaagccacgatttggatcaccgtggtgtgaataactcttacatacagcgaagtgaacatccacttgcccagctttactgccattcaatcatggaacaccatcattttgaccagtgcctgatgattcttaatagtccaggcaatcagattctcagtggcctctccattgaagaatataagaccacgttgaaaataatcaagcaagctattttagctacagacctagcactgtacattaagaggctaggagaatttgctgaacttataagaaaaaatcaattcaatttggaagatcctcatcaaaaggagttgtttttggcaatgctgatgacagcttgtgatctttctgcaattacaaaaccctggcctattcaacaacggatagcagaacttgtagcaactgaattttttgatcaaggagacagagagagaaaagaactcaacatagaacccactgatctaatgaacagggagaagaaaaacaaaatcccaagtatgcaagttgggttcatagatgccatctgcttgcaactgtatgaggccctgacccacgtgtcagaggactgtttccctttgctagatggctgcagaaagaacaggcagaaatggcaggcccttgcagaacagcagtgatctagataatacgactcactagagatcccgcccctctccctcccccccccctaacgttactggccgaagccgcttggaataaggccggtgtgcgtttgtctatatgttattttccaccatattgccgtcttttggcaatgtgagggcccggaaacctggccctgtcttcttgacgagcattcctaggggtctttcccctctcgccaaaggaatgcaaggtctgttgaatgtcgtgaaggaagcagttcctctggaagcttcttgaagacaaacaacgtctgtagcgaccctttgcaggcagcggaaccccccacctggcgacaggtgcctctgcggccaaaagccacgtgtataagatacacctgcaaaggcggcacaaccccagtgccacgttgtgagttggatagttgtggaaagagtcaaatggctctcctcaagcgtattcaacaaggggctgaaggatgcccagaaggtaccccattgtatgggatctgatctggggcctcggtgcacatgctttacatgtgtttagtcgaggttaaaaaaacgtctaggccccccgaaccacggggacgtggttttcctttgaaaaacacgatgataatatggccacaaccatgatgagcaagggcgaggaggataacatggccatcatcaaggagttcatgcgcttcaaggtgcacatggagggctccgtgaacggccacgagttcgagatcgagggcgagggcgagggccgcccctacgagggcacccagaccgccaagctgaaggtgaccaagggtggccccctgcccttcgcctgggacatcctgtcccctcagttcatgtacggctccaaggcctacgtgaagcaccccgccgacatccccgactacttgaagctgtccttccccgagggcttcaagtgggagcgcgtgatgaacttcgaggacggcggcgtggtgaccgtgacccaggactcctccctgcaggacggcgagttcatctacaaggtgaagctgcgcggcaccaacttcccctccgacggccccgtaatgcagaagaagaccatgggctgggaggcctcctccgagcggatgtaccccgaggacggcgccctgaagggcgagatcaagcagaggctgaagctgaaggacggcggccactacgacgctgaggtcaagaccacctacaaggccaagaagcccgtgcagctgcccggcgcctacaacgtcaacatcaagttggacatcacctcccacaacgaggactacaccatcgtggaacagtacgaacgcgccgagggccgccactccaccggcggcatggacgagctgtacaagtaa

SEQ ID NO: 8684 - DNA, 2154 bp, Artificial Sequence
  source: /note="Description of Artificial Sequence: Synthetic Construct"
atggactggacatggatactcttcctggtagcagccgccacacgagtgcacagcaactgggtgaatgtaataagtgatttgaaaaaaattgaagatcttattcaatctatgcatattgatgctactttatatacggaaagtgatgttcaccccagttgcaaagtaacagcaatgaagtgctttctcttggagttacaagttatttcacttgagtccggagatgcaagtattcatgatacagtagaaaatctgatcatcctagcaaacaacagtttgtcttctaatgggaatgtaacagaatctggatgcaaagaatgtgaggaactggaggaaaaaaatattaaagaatttttgcagagttttgtacatattgtccaaatgttcatcaacacttctggttccgaagaaacaagagagctacagtcgttagcggctgctgtggtgccatctgcccagacccttaaaattactgactttagcttcagtgactttgagctgtctgatctggaaacagcactgtgtacaattcggatgtttactgacctcaaccttgtgcagaacttccagatgaaacatgaggttctttgcagatggattttaagtgttaagaagaattatcggaagaatgttgcctatcataattggagacatgcctttaatacagctcagtgcatgtttgctgctctaaaagcaggcaaaattcagaacaagctgactgacctggagatacttgcattgctgattgctgcactaagccacgatttggatcaccgtggtgtgaataactcttacatacagcgaagtgaacatccacttgcccagctttactgccattcaatcatggaacaccatcattttgaccagtgcctgatgattcttaatagtccaggcaatcagattctcagtggcctctccattgaagaatataagaccacgttgaaaataatcaagcaagctattttagctacagacctagcactgtacattaagaggctaggagaatttgctgaacttataagaaaaaatcaattcaatttggaagatcctcatcaaaaggagttgtttttggcaatgctgatgacagcttgtgatctttctgcaattacaaaaccctggcctattcaacaacggatagcagaacttgtagcaactgaattttttgatcaaggagacagagagagaaaagaactcaacatagaacccactgatctaatgaacagggagaagaaaaacaaaatcccaagtatgcaagttgggttcatagatgccatctgcttgcaactgtatgaggccctgacccacgtgtcagaggactgtttccctttgctagatggctgcagaaagaacaggcagaaatggcaggcccttgcagaacagcagggatccggagctactaacttcagcctgctgaagcaggctggagacgtggaggagaaccctggacctttgagcaagggcgaggaggacaacatggccatcatcaaggagttcatgcgcttcaaggtgcacatggagggctccgtgaacggccacgagttcgagatcgagggcgagggcgagggccgcccctacgagggcacccagaccgccaagctgaaggtgaccaagggcggccccctgcccttcgcctgggacatcctgtcccctcagttcatgtacggctccaaggcctacgtgaagcaccccgccgacatccccgactacttgaagctgtccttccccgagggcttcaagtgggagcgcgtgatgaacttcgaggacggcggcgtggtgaccgtgacccaggactcctccctgcaggacggcgagttcatctacaaggtgaagctgcgcggcaccaacttcccctccgacggccccgtaatgcagaagaagaccatgggctgggaggcctcctccgagcggatgtaccccgaggacggcgccctgaagggcgagatcaagcagaggctgaagctgaaggacggcggccactacgacgccgaggtcaagaccacctacaaggccaagaagcccgtgcagctgcccggcgcctacaacgtcaacatcaagctggacatcacctcccacaacgaggactacaccatcgtggaacagtacgagcgcgccgagggccgccactccaccggcggcatggacgagctgtacaagtaa

SEQ ID NO: 8685 - protein, 741 aa, Artificial Sequence
  source: /note="Description of Artificial Sequence: Synthetic Construct"
MDWTWILFLVAAATRVHSDYKDDDDKNWVNVISDLKKIEDLIQSMHIDATLYTESDVHPSCKVTAMKCFLLELQVISLESGDASIHDTVENLIILANNSLSSNGNVTESGCKECEELEEKNIKEFLQSFVHIVQMFINTSSGGGSGGGGSGGGGSGGGGSGGGSLQYPYDVPDYAITCPPPMSVEHADIWVKSYSLYSRERYICNSGFKRKAGTSSLTECVLNKATNVAHWTTPSLKCIRDPALVHQRPAPPSTVTTAGVTPQPESLSPSGKEPAASSPSSNNTAATTAAIVPGSQLMPSKSPSTGTTEISSHESSHGTPSQTTAKNWELTASASHQPPGVYPQGHSDTTVAISTSTVLLCGLSAVSLLACYLKSRQTPPLASVEMEAMEALPVTWGTSSRDEDLENCSHHLGSGEETRELQSLAAAVVPSAQTLKITDFSFSDFELSDLETALCTIRMFTDLNLVQNFQMKHEVLCRWILSVKKNYRKNVAYHNWRHAFNTAQCMFAALKAGKIQNKLTDLEILALLIAALSHDLDHRGVNNSYIQRSEHPLAQLYCHSIMEHHHFDQCLMILNSPGNQILSGLSIEEYKTTLKIIKQAILATDLALYIKRIGEFFELIRKNQFNLEDPHQKELFLAMLMTACDLSAITKPWPIQQRIAELVATEFFDQGDRERKELNIEPTDLMNREKKNKIPSMQVGFIDAICLQLYEALTHVSEDCFPLLDGCRKNRQKWQALAEQQ

SEQ ID NO: 8686 - protein, 741 aa, Artificial Sequence
  source: /note="Description of Artificial Sequence: Synthetic Construct"
MDWTWILFLVAAATRVHSDYKDDDDKNWVNVISDLKKIEDLIQSMHIDATLYTESDVHPSCKVTAMKCFLLELQVISLESGDASIHDTVENLIILANNSLSSNGNVTESGCKECEELEEKNIKEFLQSFVHIVQMFINTSSGGGSGGGGSGGGGSGGGGSGGGSLQYPYDVPDYAITCPPPMSVEHADIWVKSYSLYSRERYICNSGFKRKAGTSSLTECVLNKATNVAHWTTPSLKCIRDPALVHQRPAPPSTVTTAGVTPQPESLSPSGKEPAASSPSSNNTAATTAAIVPGSQLMPSKSPSTGTTEISSHESSHGTPSQTTAKNWELTASASHQPPGVYPQGHSDTTVAISTSTVLLCGLSAVSLLACYLKSRQTPPLASVEMEAMEALPVTWGTSSRDEDLENCSHHLGSGEETRELQSLAAAVVPSAQTLKITDFSFSDFELSDLETALCTIRMFTDLNLVQNFQMKHEVLCRWILSVKKNYRKNVAYHNWRHAFNTAQCMFAALKAGKIQNKLTDLEILALLIAALSHDLDHRGVNNSYIQRSEHPLAQLYCHSIMEHHHFDQCLMILNSPGNQILSGLSIEEYKTTLKIIKQAILATDLALYIKRMGEFFELIRKNQFNLEDPHQKELFLAMLMTACDLSAITKPWPIQQRIAELVATEFFDQGDRERKELNIEPTDLMNREKKNKIPSMQVGFIDAICLQLYEALTHVSEDCFPLLDGCRKNRQKWQALAEQQ

SEQ ID NO: 8687 - protein, 741 aa, Artificial Sequence
  source: /note="Description of Artificial Sequence: Synthetic Construct"
MDWTWILFLVAAATRVHSDYKDDDDKNWVNVISDLKKIEDLIQSMHIDATLYTESDVHPSCKVTAMKCFLLELQVISLESGDASIHDTVENLIILANNSLSSNGNVTESGCKECEELEEKNIKEFLQSFVHIVQMFINTSSGGGSGGGGSGGGGSGGGGSGGGSLQYPYDVPDYAITCPPPMSVEHADIWVKSYSLYSRERYICNSGFKRKAGTSSLTECVLNKATNVAHWTTPSLKCIRDPALVHQRPAPPSTVTTAGVTPQPESLSPSGKEPAASSPSSNNTAATTAAIVPGSQLMPSKSPSTGTTEISSHESSHGTPSQTTAKNWELTASASHQPPGVYPQGHSDTTVAISTSTVLLCGLSAVSLLACYLKSRQTPPLASVEMEAMEALPVTWGTSSRDEDLENCSHHLGSGEETRELQSLAAAVVPSAQTLKITDFSFSDFELSDLETALCTIRMFTDLNLVQNFQMKHEVLCRWILSVKKNYRKNVAYHNWRHAFNTAQCMFAALKAGKIQNKLTDLEILALLIAALSHDLDHRGVNNSYIQRSEHPLAQLYCHSIMEHHHFDQCLMILNSPGNQILSGLSIEEYKTTLKIIKQAILATDLALYIKRVGEFFELIRKNQFNLEDPHQKELFLAMLMTACDLSAITKPWPIQQRIAELVATEFFDQGDRERKELNIEPTDLMNREKKNKIPSMQVGFIDAICLQLYEALTHVSEDCFPLLDGCRKNRQKWQALAEQQ

SEQ ID NO: 8688 - protein, 741 aa, Artificial Sequence
  source: /note="Description of Artificial Sequence: Synthetic Construct"
MDWTWILFLVAAATRVHSDYKDDDDKNWVNVISDLKKIEDLIQSMHIDATLYTESDVHPSCKVTAMKCFLLELQVISLESGDASIHDTVENLIILANNSLSSNGNVTESGCKECEELEEKNIKEFLQSFVHIVQMFINTSSGGGSGGGGSGGGGSGGGGSGGGSLQYPYDVPDYAITCPPPMSVEHADIWVKSYSLYSRERYICNSGFKRKAGTSSLTECVLNKATNVAHWTTPSLKCIRDPALVHQRPAPPSTVTTAGVTPQPESLSPSGKEPAASSPSSNNTAATTAAIVPGSQLMPSKSPSTGTTEISSHESSHGTPSQTTAKNWELTASASHQPPGVYPQGHSDTTVAISTSTVLLCGLSAVSLLACYLKSRQTPPLASVEMEAMEALPVTWGTSSRDEDLENCSHHLGSGEETRELQSLAAAVVPSAQTLKITDFSFSDFELSDLETALCTIRMFTDLNLVQNFQMKHEVLCRWILSVKKNYRKNVAYHNWRHAFNTAQCMFAALKAGKIQNKLTDLEILALLIAALSHDLDHRGVNNSYIQRSEHPLAQLYCHSIMEHHHFDQCLMILNSPGNQILSGLSIEEYKTTLKIIKQAILATDLALYIKRSGEFFELIRKNQFNLEDPHQKELFLAMLMTACDLSAITKPWPIQQRIAELVATEFFDQGDRERKELNIEPTDLMNREKKNKIPSMQVGFIDAICLQLYEALTHVSEDCFPLLDGCRKNRQKWQALAEQQ

SEQ ID NO: 8689 - protein, 741 aa, Artificial Sequence
  source: /note="Description of Artificial Sequence: Synthetic Construct"
MDWTWILFLVAAATRVHSDYKDDDDKNWVNVISDLKKIEDLIQSMHIDATLYTESDVHPSCKVTAMKCFLLELQVISLESGDASIHDTVENLIILANNSLSSNGNVTESGCKECEELEEKNIKEFLQSFVHIVQMFINTSSGGGSGGGGSGGGGSGGGGSGGGSLQYPYDVPDYAITCPPPMSVEHADIWVKSYSLYSRERYICNSGFKRKAGTSSLTECVLNKATNVAHWTTPSLKCIRDPALVHQRPAPPSTVTTAGVTPQPESLSPSGKEPAASSPSSNNTAATTAAIVPGSQLMPSKSPSTGTTEISSHESSHGTPSQTTAKNWELTASASHQPPGVYPQGHSDTTVAISTSTVLLCGLSAVSLLACYLKSRQTPPLASVEMEAMEALPVTWGTSSRDEDLENCSHHLGSGEETRELQSLAAAVVPSAQTLKITDFSFSDFELSDLETALCTIRMFTDLNLVQNFQMKHEVLCRWILSVKKNYRKNVAYHNWRHAFNTAQCMFAALKAGKIQNKLTDLEILALLIAALSHDLDHRGVNNSYIQRSEHPLAQLYCHSIMEHHHFDQCLMILNSPGNQILSGLSIEEYKTTLKIIKQAILATDLALYIKRPGEFFELIRKNQFNLEDPHQKELFLAMLMTACDLSAITKPWPIQQRIAELVATEFFDQGDRERKELNIEPTDLMNREKKNKIPSMQVGFIDAICLQLYEALTHVSEDCFPLLDGCRKNRQKWQALAEQQ

SEQ ID NO: 8690 - protein, 741 aa, Artificial Sequence
  source: /note="Description of Artificial Sequence: Synthetic Construct"
MDWTWILFLVAAATRVHSDYKDDDDKNWVNVISDLKKIEDLIQSMHIDATLYTESDVHPSCKVTAMKCFLLELQVISLESGDASIHDTVENLIILANNSLSSNGNVTESGCKECEELEEKNIKEFLQSFVHIVQMFINTSSGGGSGGGGSGGGGSGGGGSGGGSLQYPYDVPDYAITCPPPMSVEHADIWVKSYSLYSRERYICNSGFKRKAGTSSLTECVLNKATNVAHWTTPSLKCIRDPALVHQRPAPPSTVTTAGVTPQPESLSPSGKEPAASSPSSNNTAATTAAIVPGSQLMPSKSPSTGTTEISSHESSHGTPSQTTAKNWELTASASHQPPGVYPQGHSDTTVAISTSTVLLCGLSAVSLLACYLKSRQTPPLASVEMEAMEALPVTWGTSSRDEDLENCSHHLGSGEETRELQSLAAAVVPSAQTLKITDFSFSDFELSDLETALCTIRMFTDLNLVQNFQMKHEVLCRWILSVKKNYRKNVAYHNWRHAFNTAQCMFAALKAGKIQNKLTDLEILALLIAALSHDLDHRGVNNSYIQRSEHPLAQLYCHSIMEHHHFDQCLMILNSPGNQILSGLSIEEYKTTLKIIKQAILATDLALYIKRAGEFFELIRKNQFNLEDPHQKELFLAMLMTACDLSAITKPWPIQQRIAELVATEFFDQGDRERKELNIEPTDLMNREKKNKIPSMQVGFIDAICLQLYEALTHVSEDCFPLLDGCRKNRQKWQALAEQQ

SEQ ID NO: 8691 - protein, 741 aa, Artificial Sequence
  source: /note="Description of Artificial Sequence: Synthetic Construct"
MDWTWILFLVAAATRVHSDYKDDDDKNWVNVISDLKKIEDLIQSMHIDATLYTESDVHPSCKVTAMKCFLLELQVISLESGDASIHDTVENLIILANNSLSSNGNVTESGCKECEELEEKNIKEFLQSFVHIVQMFINTSSGGGSGGGGSGGGGSGGGGSGGGSLQYPYDVPDYAITCPPPMSVEHADIWVKSYSLYSRERYICNSGFKRKAGTSSLTECVLNKATNVAHWTTPSLKCIRDPALVHQRPAPPSTVTTAGVTPQPESLSPSGKEPAASSPSSNNTAATTAAIVPGSQLMPSKSPSTGTTEISSHESSHGTPSQTTAKNWELTASASHQPPGVYPQGHSDTTVAISTSTVLLCGLSAVSLLACYLKSRQTPPLASVEMEAMEALPVTWGTSSRDEDLENCSHHLGSGEETRELQSLAAAVVPSAQTLKITDFSFSDFELSDLETALCTIRMFTDLNLVQNFQMKHEVLCRWILSVKKNYRKNVAYHNWRHAFNTAQCMFAALKAGKIQNKLTDLEILALLIAALSHDLDHRGVNNSYIQRSEHPLAQLYCHSIMEHHHFDQCLMILNSPGNQILSGLSIEEYKTTLKIIKQAILATDLALYIKRYGEFFELIRKNQFNLEDPHQKELFLAMLMTACDLSAITKPWPIQQRIAELVATEFFDQGDRERKELNIEPTDLMNREKKNKIPSMQVGFIDAICLQLYEALTHVSEDCFPLLDGCRKNRQKWQALAEQQ

SEQ ID NO: 8692 - protein, 741 aa, Artificial Sequence
  source: /note="Description of Artificial Sequence: Synthetic Construct"
MDWTWILFLVAAATRVHSDYKDDDDKNWVNVISDLKKIEDLIQSMHIDATLYTESDVHPSCKVTAMKCFLLELQVISLESGDASIHDTVENLIILANNSLSSNGNVTESGCKECEELEEKNIKEFLQSFVHIVQMFINTSSGGGSGGGGSGGGGSGGGGSGGGSLQYPYDVPDYAITCPPPMSVEHADIWVKSYSLYSRERYICNSGFKRKAGTSSLTECVLNKATNVAHWTTPSLKCIRDPALVHQRPAPPSTVTTAGVTPQPESLSPSGKEPAASSPSSNNTAATTAAIVPGSQLMPSKSPSTGTTEISSHESSHGTPSQTTAKNWELTASASHQPPGVYPQGHSDTTVAISTSTVLLCGLSAVSLLACYLKSRQTPPLASVEMEAMEALPVTWGTSSRDEDLENCSHHLGSGEETRELQSLAAAVVPSAQTLKITDFSFSDFELSDLETALCTIRMFTDLNLVQNFQMKHEVLCRWILSVKKNYRKNVAYHNWRHAFNTAQCMFAALKAGKIQNKLTDLEILALLIAALSHDLDHRGVNNSYIQRSEHPLAQLYCHSIMEHHHFDQCLMILNSPGNQILSGLSIEEYKTTLKIIKQAILATDLALYIKRHGEFFELIRKNQFNLEDPHQKELFLAMLMTACDLSAITKPWPIQQRIAELVATEFFDQGDRERKELNIEPTDLMNREKKNKIPSMQVGFIDAICLQLYEALTHVSEDCFPLLDGCRKNRQKWQALAEQQ

SEQ ID NO: 8693 - protein, 741 aa, Artificial Sequence
  source: /note="Description of Artificial Sequence: Synthetic Construct"
MDWTWILFLVAAATRVHSDYKDDDDKNWVNVISDLKKIEDLIQSMHIDATLYTESDVHPSCKVTAMKCFLLELQVISLESGDASIHDTVENLIILANNSLSSNGNVTESGCKECEELEEKNIKEFLQSFVHIVQMFINTSSGGGSGGGGSGGGGSGGGGSGGGSLQYPYDVPDYAITCPPPMSVEHADIWVKSYSLYSRERYICNSGFKRKAGTSSLTECVLNKATNVAHWTTPSLKCIRDPALVHQRPAPPSTVTTAGVTPQPESLSPSGKEPAASSPSSNNTAATTAAIVPGSQLMPSKSPSTGTTEISSHESSHGTPSQTTAKNWELTASASHQPPGVYPQGHSDTTVAISTSTVLLCGLSAVSLLACYLKSRQTPPLASVEMEAMEALPVTWGTSSRDEDLENCSHHLGSGEETRELQSLAAAVVPSAQTLKITDFSFSDFELSDLETALCTIRMFTDLNLVQNFQMKHEVLCRWILSVKKNYRKNVAYHNWRHAFNTAQCMFAALKAGKIQNKLTDLEILALLIAALSHDLDHRGVNNSYIQRSEHPLAQLYCHSIMEHHHFDQCLMILNSPGNQILSGLSIEEYKTTLKIIKQAILATDLALYIKRQGEFFELIRKNQFNLEDPHQKELFLAMLMTACDLSAITKPWPIQQRIAELVATEFFDQGDRERKELNIEPTDLMNREKKNKIPSMQVGFIDAICLQLYEALTHVSEDCFPLLDGCRKNRQKWQALAEQQ

SEQ ID NO: 8694 - protein, 741 aa, Artificial Sequence
  source: /note="Description of Artificial Sequence: Synthetic Construct"
MDWTWILFLVAAATRVHSDYKDDDDKNWVNVISDLKKIEDLIQSMHIDATLYTESDVHPSCKVTAMKCFLLELQVISLESGDASIHDTVENLIILANNSLSSNGNVTESGCKECEELEEKNIKEFLQSFVHIVQMFINTSSGGGSGGGGSGGGGSGGGGSGGGSLQYPYDVPDYAITCPPPMSVEHADIWVKSYSLYSRERYICNSGFKRKAGTSSLTECVLNKATNVAHWTTPSLKCIRDPALVHQRPAPPSTVTTAGVTPQPESLSPSGKEPAASSPSSNNTAATTAAIVPGSQLMPSKSPSTGTTEISSHESSHGTPSQTTAKNWELTASASHQPPGVYPQGHSDTTVAISTSTVLLCGLSAVSLLACYLKSRQTPPLASVEMEAMEALPVTWGTSSRDEDLENCSHHLGSGEETRELQSLAAAVVPSAQTLKITDFSFSDFELSDLETALCTIRMFTDLNLVQNFQMKHEVLCRWILSVKKNYRKNVAYHNWRHAFNTAQCMFAALKAGKIQNKLTDLEILALLIAALSHDLDHRGVNNSYIQRSEHPLAQLYCHSIMEHHHFDQCLMILNSPGNQILSGLSIEEYKTTLKIIKQAILATDLALYIKRNGEFFELIRKNQFNLEDPHQKELFLAMLMTACDLSAITKPWPIQQRIAELVATEFFDQGDRERKELNIEPTDLMNREKKNKIPSMQVGFIDAICLQLYEALTHVSEDCFPLLDGCRKNRQKWQALAEQQ

SEQ ID NO: 8695 - protein, 741 aa, Artificial Sequence
  source: /note="Description of Artificial Sequence: Synthetic Construct"
MDWTWILFLVAAATRVHSDYKDDDDKNWVNVISDLKKIEDLIQSMHIDATLYTESDVHPSCKVTAMKCFLLELQVISLESGDASIHDTVENLIILANNSLSSNGNVTESGCKECEELEEKNIKEFLQSFVHIVQMFINTSSGGGSGGGGSGGGGSGGGGSGGGSLQYPYDVPDYAITCPPPMSVEHADIWVKSYSLYSRERYICNSGFKRKAGTSSLTECVLNKATNVAHWTTPSLKCIRDPALVHQRPAPPSTVTTAGVTPQPESLSPSGKEPAASSPSSNNTAATTAAIVPGSQLMPSKSPSTGTTEISSHESSHGTPSQTTAKNWELTASASHQPPGVYPQGHSDTTVAISTSTVLLCGLSAVSLLACYLKSRQTPPLASVEMEAMEALPVTWGTSSRDEDLENCSHHLGSGEETRELQSLAAAVVPSAQTLKITDFSFSDFELSDLETALCTIRMFTDLNLVQNFQMKHEVLCRWILSVKKNYRKNVAYHNWRHAFNTAQCMFAALKAGKIQNKLTDLEILALLIAALSHDLDHRGVNNSYIQRSEHPLAQLYCHSIMEHHHFDQCLMILNSPGNQILSGLSIEEYKTTLKIIKQAILATDLALYIKRKGEFFELIRKNQFNLEDPHQKELFLAMLMTACDLSAITKPWPIQQRIAELVATEFFDQGDRERKELNIEPTDLMNREKKNKIPSMQVGFIDAICLQLYEALTHVSEDCFPLLDGCRKNRQKWQALAEQQ

SEQ ID NO: 8696 - protein, 741 aa, Artificial Sequence
  source: /note="Description of Artificial Sequence: Synthetic Construct"
MDWTWILFLVAAATRVHSDYKDDDDKNWVNVISDLKKIEDLIQSMHIDATLYTESDVHPSCKVTAMKCFLLELQVISLESGDASIHDTVENLIILANNSLSSNGNVTESGCKECEELEEKNIKEFLQSFVHIVQMFINTSSGGGSGGGGSGGGGSGGGGSGGGSLQYPYDVPDYAITCPPPMSVEHADIWVKSYSLYSRERYICNSGFKRKAGTSSLTECVLNKATNVAHWTTPSLKCIRDPALVHQRPAPPSTVTTAGVTPQPESLSPSGKEPAASSPSSNNTAATTAAIVPGSQLMPSKSPSTGTTEISSHESSHGTPSQTTAKNWELTASASHQPPGVYPQGHSDTTVAISTSTVLLCGLSAVSLLACYLKSRQTPPLASVEMEAMEALPVTWGTSSRDEDLENCSHHLGSGEETRELQSLAAAVVPSAQTLKITDFSFSDFELSDLETALCTIRMFTDLNLVQNFQMKHEVLCRWILSVKKNYRKNVAYHNWRHAFNTAQCMFAALKAGKIQNKLTDLEILALLIAALSHDLDHRGVNNSYIQRSEHPLAQLYCHSIMEHHHFDQCLMILNSPGNQILSGLSIEEYKTTLKIIKQAILATDLALYIKRDGEFFELIRKNQFNLEDPHQKELFLAMLMTACDLSAITKPWPIQQRIAELVATEFFDQGDRERKELNIEPTDLMNREKKNKIPSMQVGFIDAICLQLYEALTHVSEDCFPLLDGCRKNRQKWQALAEQQ

SEQ ID NO: 8697 - protein, 741 aa, Artificial Sequence
  source: /note="Description of Artificial Sequence: Synthetic Construct"
MDWTWILFLVAAATRVHSDYKDDDDKNWVNVISDLKKIEDLIQSMHIDATLYTESDVHPSCKVTAMKCFLLELQVISLESGDASIHDTVENLIILANNSLSSNGNVTESGCKECEELEEKNIKEFLQSFVHIVQMFINTSSGGGSGGGGSGGGGSGGGGSGGGSLQYPYDVPDYAITCPPPMSVEHADIWVKSYSLYSRERYICNSGFKRKAGTSSLTECVLNKATNVAHWTTPSLKCIRDPALVHQRPAPPSTVTTAGVTPQPESLSPSGKEPAASSPSSNNTAATTAAIVPGSQLMPSKSPSTGTTEISSHESSHGTPSQTTAKNWELTASASHQPPGVYPQGHSDTTVAISTSTVLLCGLSAVSLLACYLKSRQTPPLASVEMEAMEALPVTWGTSSRDEDLENCSHHLGSGEETRELQSLAAAVVPSAQTLKITDFSFSDFELSDLETALCTIRMFTDLNLVQNFQMKHEVLCRWILSVKKNYRKNVAYHNWRHAFNTAQCMFAALKAGKIQNKLTDLEILALLIAALSHDLDHRGVNNSYIQRSEHPLAQLYCHSIMEHHHFDQCLMILNSPGNQILSGLSIEEYKTTLKIIKQAILATDLALYIKREGEFFELIRKNQFNLEDPHQKELFLAMLMTACDLSAITKPWPIQQRIAELVATEFFDQGDRERKELNIEPTDLMNREKKNKIPSMQVGFIDAICLQLYEALTHVSEDCFPLLDGCRKNRQKWQALAEQQ

SEQ ID NO: 8698 - protein, 741 aa, Artificial Sequence
  source: /note="Description of Artificial Sequence: Synthetic Construct"
MDWTWILFLVAAATRVHSDYKDDDDKNWVNVISDLKKIEDLIQSMHIDATLYTESDVHPSCKVTAMKCFLLELQVISLESGDASIHDTVENLIILANNSLSSNGNVTESGCKECEELEEKNIKEFLQSFVHIVQMFINTSSGGGSGGGGSGGGGSGGGGSGGGSLQYPYDVPDYAITCPPPMSVEHADIWVKSYSLYSRERYICNSGFKRKAGTSSLTECVLNKATNVAHWTTPSLKCIRDPALVHQRPAPPSTVTTAGVTPQPESLSPSGKEPAASSPSSNNTAATTAAIVPGSQLMPSKSPSTGTTEISSHESSHGTPSQTTAKNWELTASASHQPPGVYPQGHSDTTVAISTSTVLLCGLSAVSLLACYLKSRQTPPLASVEMEAMEALPVTWGTSSRDEDLENCSHHLGSGEETRELQSLAAAVVPSAQTLKITDFSFSDFELSDLETALCTIRMFTDLNLVQNFQMKHEVLCRWILSVKKNYRKNVAYHNWRHAFNTAQCMFAALKAGKIQNKLTDLEILALLIAALSHDLDHRGVNNSYIQRSEHPLAQLYCHSIMEHHHFDQCLMILNSPGNQILSGLSIEEYKTTLKIIKQAILATDLALYIKRCGEFFELIRKNQFNLEDPHQKELFLAMLMTACDLSAITKPWPIQQRIAELVATEFFDQGDRERKELNIEPTDLMNREKKNKIPSMQVGFIDAICLQLYEALTHVSEDCFPLLDGCRKNRQKWQALAEQQ

SEQ ID NO: 8699 - protein, 741 aa, Artificial Sequence
  source: /note="Description of Artificial Sequence: Synthetic Construct"
MDWTWILFLVAAATRVHSDYKDDDDKNWVNVISDLKKIEDLIQSMHIDATLYTESDVHPSCKVTAMKCFLLELQVISLESGDASIHDTVENLIILANNSLSSNGNVTESGCKECEELEEKNIKEFLQSFVHIVQMFINTSSGGGSGGGGSGGGGSGGGGSGGGSLQYPYDVPDYAITCPPPMSVEHADIWVKSYSLYSRERYICNSGFKRKAGTSSLTECVLNKATNVAHWTTPSLKCIRDPALVHQRPAPPSTVTTAGVTPQPESLSPSGKEPAASSPSSNNTAATTAAIVPGSQLMPSKSPSTGTTEISSHESSHGTPSQTTAKNWELTASASHQPPGVYPQGHSDTTVAISTSTVLLCGLSAVSLLACYLKSRQTPPLASVEMEAMEALPVTWGTSSRDEDLENCSHHLGSGEETRELQSLAAAVVPSAQTLKITDFSFSDFELSDLETALCTIRMFTDLNLVQNFQMKHEVLCRWILSVKKNYRKNVAYHNWRHAFNTAQCMFAALKAGKIQNKLTDLEILALLIAALSHDLDHRGVNNSYIQRSEHPLAQLYCHSIMEHHHFDQCLMILNSPGNQILSGLSIEEYKTTLKIIKQAILATDLALYIKRGGEFFELIRKNQFNLEDPHQKELFLAMLMTACDLSAITKPWPIQQRIAELVATEFFDQGDRERKELNIEPTDLMNREKKNKIPSMQVGFIDAICLQLYEALTHVSEDCFPLLDGCRKNRQKWQALAEQQ

SEQ ID NO: 8700 - protein, 741 aa, Artificial Sequence
  source: /note="Description of Artificial Sequence: Synthetic Construct"
MDWTWILFLVAAATRVHSDYKDDDDKNWVNVISDLKKIEDLIQSMHIDATLYTESDVHPSCKVTAMKCFLLELQVISLESGDASIHDTVENLIILANNSLSSNGNVTESGCKECEELEEKNIKEFLQSFVHIVQMFINTSSGGGSGGGGSGGGGSGGGGSGGGSLQYPYDVPDYAITCPPPMSVEHADIWVKSYSLYSRERYICNSGFKRKAGTSSLTECVLNKATNVAHWTTPSLKCIRDPALVHQRPAPPSTVTTAGVTPQPESLSPSGKEPAASSPSSNNTAATTAAIVPGSQLMPSKSPSTGTTEISSHESSHGTPSQTTAKNWELTASASHQPPGVYPQGHSDTTVAISTSTVLLCGLSAVSLLACYLKSRQTPPLASVEMEAMEALPVTWGTSSRDEDLENCSHHLGSGEETRELQSLAAAVVPSAQTLKITDFSFSDFELSDLETALCTIRMFTDLNLVQNFQMKHEVLCRWILSVKKNYRKNVAYHNWRHAFNTAQCMFAALKAGKIQNKLTDLEILALLIAALSHDLDHRGVNNSYIQRSEHPLAQLYCHSIMEHHHFDQCLMILNSPGNQILSGLSIEEYKTTLKIIKQAILATDLALYIKRWGEFFELIRKNQFNLEDPHQKELFLAMLMTACDLSAITKPWPIQQRIAELVATEFFDQGDRERKELNIEPTDLMNREKKNKIPSMQVGFIDAICLQLYEALTHVSEDCFPLLDGCRKNRQKWQALAEQQ

SEQ ID NO: 8701 - protein, 741 aa, Artificial Sequence
  source: /note="Description of Artificial Sequence: Synthetic Construct"
MDWTWILFLVAAATRVHSDYKDDDDKNWVNVISDLKKIEDLIQSMHIDATLYTESDVHPSCKVTAMKCFLLELQVISLESGDASIHDTVENLIILANNSLSSNGNVTESGCKECEELEEKNIKEFLQSFVHIVQMFINTSSGGGSGGGGSGGGGSGGGGSGGGSLQYPYDVPDYAITCPPPMSVEHADIWVKSYSLYSRERYICNSGFKRKAGTSSLTECVLNKATNVAHWTTPSLKCIRDPALVHQRPAPPSTVTTAGVTPQPESLSPSGKEPAASSPSSNNTAATTAAIVPGSQLMPSKSPSTGTTEISSHESSHGTPSQTTAKNWELTASASHQPPGVYPQGHSDTTVAISTSTVLLCGLSAVSLLACYLKSRQTPPLASVEMEAMEALPVTWGTSSRDEDLENCSHHLGSGEETRELQSLAAAVVPSAQTLKITDFSFSDFELSDLETALCTIRMFTDLNLVQNFQMKHEVLCRWILSVKKNYRKNVAYHNWRHAFNTAQCMFAALKAGKIQNKLTDLEILALLIAALSHDLDHRGVNNSYIQRSEHPLAQLYCHSIMEHHHFDQCLMILNSPGNQILSGLSIEEYKTTLKIIKQAILATDLALYIKRTGEFFELIRKNQFNLEDPHQKELFLAMLMTACDLSAITKPWPIQQRIAELVATEFFDQGDRERKELNIEPTDLMNREKKNKIPSMQVGFIDAICLQLYEALTHVSEDCFPLLDGCRKNRQKWQALAEQQ

SEQ ID NO: 8702 - DNA, 2226 bp, Artificial Sequence
  source: /note="Description of Artificial Sequence: Synthetic Construct"
atggactggacatggatactcttcctggtagcagccgccacacgagtgcacagcgactacaaagacgatgacgacaagaactgggtgaacgtgatctccgacctgaaaaagatcgaggatttgatccagagcatgcacattgacgccaccctgtataccgagtccgacgtgcacccgagttgcaaggtgactgccatgaagtgcttcctgctggagctgcaagtgatcagcctggagagcggcgacgccagcatccacgacaccgtggaaaaccttatcattctggccaacaatagcctgagcagcaacggcaacgtgaccgaaagcggatgtaaggaatgcgaggaactggaagagaagaatatcaaagaattcctgcaaagcttcgtgcacatcgtgcagatgttcatcaacacttcttcaggtggcggtagtggtgggggaggatctggaggcggaggaagcgggggtggaggttcaggtggaggcagcttgcaatacccatacgatgttccagattacgctattacctgcccccctccgatgagcgtggagcacgccgacatctgggtcaagagctacagcttgtatagtagggagcggtacatctgtaacagcgggttcaagaggaaggccgggaccagctcactgaccgagtgcgtgttgaacaaggccaccaacgtggcccactggaccacccctagccttaagtgcatcagggacccagcgctcgtacaccagagacccgcgcctccctctacggtaaccacggcaggcgtaaccccccagcccgagagcctgtccccgagcggcaaggagcctgcagcgagcagcccctcaagcaacaacacagccgctaccaccgcggcaatcgtgcccggcagccagctgatgccctcaaagagccccagcaccggcaccactgagataagcagccacgagagctcacacggcactccctcacagaccactgccaagaattgggagctgaccgcctctgccagccaccagcccccaggcgtgtatccccagggccacagcgacaccacggtcgccatcagcacatctacagtgcttttgtgcggccttagcgccgtgtcactgctggcatgctacttgaaaagtaggcaaactccccctcttgccagtgtggaaatggaggccatggaagccctgcccgtgacctggggcaccagttctagggacgaggaccttgagaactgctcacatcatttgggatccggtgaagaaacaagagagctacagtcgttagcggctgctgtggtgccatctgcccagacccttaaaattactgactttagcttcagtgactttgagctgtctgatctggaaacagcactgtgtacaattcggatgtttactgacctcaaccttgtgcagaacttccagatgaaacatgaggttctttgcagatggattttaagtgttaagaagaattatcggaagaatgttgcctatcataattggagacatgcctttaatacagctcagtgcatgtttgctgctctaaaagcaggcaaaattcagaacaagctgactgacctggagatacttgcattgctgattgctgcactaagccacgatttggatcaccgtggtgtgaataactcttacatacagcgaagtgaacatccacttgcccagctttactgccattcaatcatggaacaccatcattttgaccagtgcctgatgattcttaatagtccaggcaatcagattctcagtggcctctccattgaagaatataagaccacgttgaaaataatcaagcaagctattttagctacagacctagcactgtacattaagaggataggagaattttttgaacttataagaaaaaatcaattcaatttggaagatcctcatcaaaaggagttgtttttggcaatgctgatgacagcttgtgatctttctgcaattacaaaaccctggcctattcaacaacggatagcagaacttgtagcaactgaattttttgatcaaggagacagagagagaaaagaactcaacatagaacccactgatctaatgaacagggagaagaaaaacaaaatcccaagtatgcaagttgggttcatagatgccatctgcttgcaactgtatgaggccctgacccacgtgtcagaggactgtttccctttgctagatggctgcagaaagaacaggcagaaatggcaggcccttgcagaacagcagtga

SEQ ID NO: 8703 - DNA, 2226 bp, Artificial Sequence
  source: /note="Description of Artificial Sequence: Synthetic Construct"
atggactggacatggatactcttcctggtagcagccgccacacgagtgcacagcgactacaaagacgatgacgacaagaactgggtgaacgtgatctccgacctgaaaaagatcgaggatttgatccagagcatgcacattgacgccaccctgtataccgagtccgacgtgcacccgagttgcaaggtgactgccatgaagtgcttcctgctggagctgcaagtgatcagcctggagagcggcgacgccagcatccacgacaccgtggaaaaccttatcattctggccaacaatagcctgagcagcaacggcaacgtgaccgaaagcggatgtaaggaatgcgaggaactggaagagaagaatatcaaagaattcctgcaaagcttcgtgcacatcgtgcagatgttcatcaacacttcttcaggtggcggtagtggtgggggaggatctggaggcggaggaagcgggggtggaggttcaggtggaggcagcttgcaatacccatacgatgttccagattacgctattacctgcccccctccgatgagcgtggagcacgccgacatctgggtcaagagctacagcttgtatagtagggagcggtacatctgtaacagcgggttcaagaggaaggccgggaccagctcactgaccgagtgcgtgttgaacaaggccaccaacgtggcccactggaccacccctagccttaagtgcatcagggacccagcgctcgtacaccagagacccgcgcctccctctacggtaaccacggcaggcgtaaccccccagcccgagagcctgtccccgagcggcaaggagcctgcagcgagcagcccctcaagcaacaacacagccgctaccaccgcggcaatcgtgcccggcagccagctgatgccctcaaagagccccagcaccggcaccactgagataagcagccacgagagctcacacggcactccctcacagaccactgccaagaattgggagctgaccgcctctgccagccaccagcccccaggcgtgtatccccagggccacagcgacaccacggtcgccatcagcacatctacagtgcttttgtgcggccttagcgccgtgtcactgctggcatgctacttgaaaagtaggcaaactccccctcttgccagtgtggaaatggaggccatggaagccctgcccgtgacctggggcaccagttctagggacgaggaccttgagaactgctcacatcatttgggatccggtgaagaaacaagagagctacagtcgttagcggctgctgtggtgccatctgcccagacccttaaaattactgactttagcttcagtgactttgagctgtctgatctggaaacagcactgtgtacaattcggatgtttactgacctcaaccttgtgcagaacttccagatgaaacatgaggttctttgcagatggattttaagtgttaagaagaattatcggaagaatgttgcctatcataattggagacatgcctttaatacagctcagtgcatgtttgctgctctaaaagcaggcaaaattcagaacaagctgactgacctggagatacttgcattgctgattgctgcactaagccacgatttggatcaccgtggtgtgaataactcttacatacagcgaagtgaacatccacttgcccagctttactgccattcaatcatggaacaccatcattttgaccagtgcctgatgattcttaatagtccaggcaatcagattctcagtggcctctccattgaagaatataagaccacgttgaaaataatcaagcaagctattttagctacagacctagcactgtacattaagaggatgggagaattttttgaacttataagaaaaaatcaattcaatttggaagatcctcatcaaaaggagttgtttttggcaatgctgatgacagcttgtgatctttctgcaattacaaaaccctggcctattcaacaacggatagcagaacttgtagcaactgaattttttgatcaaggagacagagagagaaaagaactcaacatagaacccactgatctaatgaacagggagaagaaaaacaaaatcccaagtatgcaagttgggttcatagatgccatctgcttgcaactgtatgaggccctgacccacgtgtcagaggactgtttccctttgctagatggctgcagaaagaacaggcagaaatggcaggcccttgcagaacagcagtga

SEQ ID NO: 8704 - DNA, 2226 bp, Artificial Sequence
  source: /note="Description of Artificial Sequence: Synthetic Construct"
atggactggacatggatactcttcctggtagcagccgccacacgagtgcacagcgactacaaagacgatgacgacaagaactgggtgaacgtgatctccgacctgaaaaagatcgaggatttgatccagagcatgcacattgacgccaccctgtataccgagtccgacgtgcacccgagttgcaaggtgactgccatgaagtgcttcctgctggagctgcaagtgatcagcctggagagcggcgacgccagcatccacgacaccgtggaaaaccttatcattctggccaacaatagcctgagcagcaacggcaacgtgaccgaaagcggatgtaaggaatgcgaggaactggaagagaagaatatcaaagaattcctgcaaagcttcgtgcacatcgtgcagatgttcatcaacacttcttcaggtggcggtagtggtgggggaggatctggaggcggaggaagcgggggtggaggttcaggtggaggcagcttgcaatacccatacgatgttccagattacgctattacctgcccccctccgatgagcgtggagcacgccgacatctgggtcaagagctacagcttgtatagtagggagcggtacatctgtaacagcgggttcaagaggaaggccgggaccagctcactgaccgagtgcgtgttgaacaaggccaccaacgtggcccactggaccacccctagccttaagtgcatcagggacccagcgctcgtacaccagagacccgcgcctccctctacggtaaccacggcaggcgtaaccccccagcccgagagcctgtccccgagcggcaaggagcctgcagcgagcagcccctcaagcaacaacacagccgctaccaccgcggcaatcgtgcccggcagccagctgatgccctcaaagagccccagcaccggcaccactgagataagcagccacgagagctcacacggcactccctcacagaccactgccaagaattgggagctgaccgcctctgccagccaccagcccccaggcgtgtatccccagggccacagcgacaccacggtcgccatcagcacatctacagtgcttttgtgcggccttagcgccgtgtcactgctggcatgctacttgaaaagtaggcaaactccccctcttgccagtgtggaaatggaggccatggaagccctgcccgtgacctggggcaccagttctagggacgaggaccttgagaactgctcacatcatttgggatccggtgaagaaacaagagagctacagtcgttagcggctgctgtggtgccatctgcccagacccttaaaattactgactttagcttcagtgactttgagctgtctgatctggaaacagcactgtgtacaattcggatgtttactgacctcaaccttgtgcagaacttccagatgaaacatgaggttctttgcagatggattttaagtgttaagaagaattatcggaagaatgttgcctatcataattggagacatgcctttaatacagctcagtgcatgtttgctgctctaaaagcaggcaaaattcagaacaagctgactgacctggagatacttgcattgctgattgctgcactaagccacgatttggatcaccgtggtgtgaataactcttacatacagcgaagtgaacatccacttgcccagctttactgccattcaatcatggaacaccatcattttgaccagtgcctgatgattcttaatagtccaggcaatcagattctcagtggcctctccattgaagaatataagaccacgttgaaaataatcaagcaagctattttagctacagacctagcactgtacattaagagggtaggagaattttttgaacttataagaaaaaatcaattcaatttggaagatcctcatcaaaaggagttgtttttggcaatgctgatgacagcttgtgatctttctgcaattacaaaaccctggcctattcaacaacggatagcagaacttgtagcaactgaattttttgatcaaggagacagagagagaaaagaactcaacatagaacccactgatctaatgaacagggagaagaaaaacaaaatcccaagtatgcaagttgggttcatagatgccatctgcttgcaactgtatgaggccctgacccacgtgtcagaggactgtttccctttgctagatggctgcagaaagaacaggcagaaatggcaggcccttgcagaacagcagtga

SEQ ID NO: 8705 - DNA, 2226 bp, Artificial Sequence
  source: /note="Description of Artificial Sequence: Synthetic Construct"
atggactggacatggatactcttcctggtagcagccgccacacgagtgcacagcgactacaaagacgatgacgacaagaactgggtgaacgtgatctccgacctgaaaaagatcgaggatttgatccagagcatgcacattgacgccaccctgtataccgagtccgacgtgcacccgagttgcaaggtgactgccatgaagtgcttcctgctggagctgcaagtgatcagcctggagagcggcgacgccagcatccacgacaccgtggaaaaccttatcattctggccaacaatagcctgagcagcaacggcaacgtgaccgaaagcggatgtaaggaatgcgaggaactggaagagaagaatatcaaagaattcctgcaaagcttcgtgcacatcgtgcagatgttcatcaacacttcttcaggtggcggtagtggtgggggaggatctggaggcggaggaagcgggggtggaggttcaggtggaggcagcttgcaatacccatacgatgttccagattacgctattacctgcccccctccgatgagcgtggagcacgccgacatctgggtcaagagctacagcttgtatagtagggagcggtacatctgtaacagcgggttcaagaggaaggccgggaccagctcactgaccgagtgcgtgttgaacaaggccaccaacgtggcccactggaccacccctagccttaagtgcatcagggacccagcgctcgtacaccagagacccgcgcctccctctacggtaaccacggcaggcgtaaccccccagcccgagagcctgtccccgagcggcaaggagcctgcagcgagcagcccctcaagcaacaacacagccgctaccaccgcggcaatcgtgcccggcagccagctgatgccctcaaagagccccagcaccggcaccactgagataagcagccacgagagctcacacggcactccctcacagaccactgccaagaattgggagctgaccgcctctgccagccaccagcccccaggcgtgtatccccagggccacagcgacaccacggtcgccatcagcacatctacagtgcttttgtgcggccttagcgccgtgtcactgctggcatgctacttgaaaagtaggcaaactccccctcttgccagtgtggaaatggaggccatggaagccctgcccgtgacctggggcaccagttctagggacgaggaccttgagaactgctcacatcatttgggatccggtgaagaaacaagagagctacagtcgttagcggctgctgtggtgccatctgcccagacccttaaaattactgactttagcttcagtgactttgagctgtctgatctggaaacagcactgtgtacaattcggatgtttactgacctcaaccttgtgcagaacttccagatgaaacatgaggttctttgcagatggattttaagtgttaagaagaattatcggaagaatgttgcctatcataattggagacatgcctttaatacagctcagtgcatgtttgctgctctaaaagcaggcaaaattcagaacaagctgactgacctggagatacttgcattgctgattgctgcactaagccacgatttggatcaccgtggtgtgaataactcttacatacagcgaagtgaacatccacttgcccagctttactgccattcaatcatggaacaccatcattttgaccagtgcctgatgattcttaatagtccaggcaatcagattctcagtggcctctccattgaagaatataagaccacgttgaaaataatcaagcaagctattttagctacagacctagcactgtacattaagaggtcaggagaattttttgaacttataagaaaaaatcaattcaatttggaagatcctcatcaaaaggagttgtttttggcaatgctgatgacagcttgtgatctttctgcaattacaaaaccctggcctattcaacaacggatagcagaacttgtagcaactgaattttttgatcaaggagacagagagagaaaagaactcaacatagaacccactgatctaatgaacagggagaagaaaaacaaaatcccaagtatgcaagttgggttcatagatgccatctgcttgcaactgtatgaggccctgacccacgtgtcagaggactgtttccctttgctagatggctgcagaaagaacaggcagaaatggcaggcccttgcagaacagcagtga

SEQ ID NO: 8706 - DNA, 2226 bp, Artificial Sequence
  source: /note="Description of Artificial Sequence: Synthetic Construct"
atggactggacatggatactcttcctggtagcagccgccacacgagtgcacagcgactacaaagacgatgacgacaagaactgggtgaacgtgatctccgacctgaaaaagatcgaggatttgatccagagcatgcacattgacgccaccctgtataccgagtccgacgtgcacccgagttgcaaggtgactgccatgaagtgcttcctgctggagctgcaagtgatcagcctggagagcggcgacgccagcatccacgacaccgtggaaaaccttatcattctggccaacaatagcctgagcagcaacggcaacgtgaccgaaagcggatgtaaggaatgcgaggaactggaagagaagaatatcaaagaattcctgcaaagcttcgtgcacatcgtgcagatgttcatcaacacttcttcaggtggcggtagtggtgggggaggatctggaggcggaggaagcgggggtggaggttcaggtggaggcagcttgcaatacccatacgatgttccagattacgctattacctgcccccctccgatgagcgtggagcacgccgacatctgggtcaagagctacagcttgtatagtagggagcggtacatctgtaacagcgggttcaagaggaaggccgggaccagctcactgaccgagtgcgtgttgaacaaggccaccaacgtggcccactggaccacccctagccttaagtgcatcagggacccagcgctcgtacaccagagacccgcgcctccctctacggtaaccacggcaggcgtaaccccccagcccgagagcctgtccccgagcggcaaggagcctgcagcgagcagcccctcaagcaacaacacagccgctaccaccgcggcaatcgtgcccggcagccagctgatgccctcaaagagccccagcaccggcaccactgagataagcagccacgagagctcacacggcactccctcacagaccactgccaagaattgggagctgaccgcctctgccagccaccagcccccaggcgtgtatccccagggccacagcgacaccacggtcgccatcagcacatctacagtgcttttgtgcggccttagcgccgtgtcactgctggcatgctacttgaaaagtaggcaaactccccctcttgccagtgtggaaatggaggccatggaagccctgcccgtgacctggggcaccagttctagggacgaggaccttgagaactgctcacatcatttgggatccggtgaagaaacaagagagctacagtcgttagcggctgctgtggtgccatctgcccagacccttaaaattactgactttagcttcagtgactttgagctgtctgatctggaaacagcactgtgtacaattcggatgtttactgacctcaaccttgtgcagaacttccagatgaaacatgaggttctttgcagatggattttaagtgttaagaagaattatcggaagaatgttgcctatcataattggagacatgcctttaatacagctcagtgcatgtttgctgctctaaaagcaggcaaaattcagaacaagctgactgacctggagatacttgcattgctgattgctgcactaagccacgatttggatcaccgtggtgtgaataactcttacatacagcgaagtgaacatccacttgcccagctttactgccattcaatcatggaacaccatcattttgaccagtgcctgatgattcttaatagtccaggcaatcagattctcagtggcctctccattgaagaatataagaccacgttgaaaataatcaagcaagctattttagctacagacctagcactgtacattaagaggccaggagaattttttgaacttataagaaaaaatcaattcaatttggaagatcctcatcaaaaggagttgtttttggcaatgctgatgacagcttgtgatctttctgcaattacaaaaccctggcctattcaacaacggatagcagaacttgtagcaactgaattttttgatcaaggagacagagagagaaaagaactcaacatagaacccactgatctaatgaacagggagaagaaaaacaaaatcccaagtatgcaagttgggttcatagatgccatctgcttgcaactgtatgaggccctgacccacgtgtcagaggactgtttccctttgctagatggctgcagaaagaacaggcagaaatggcaggcccttgcagaacagcagtga

SEQ ID NO: 8707 - DNA, 2226 bp, Artificial Sequence
  source: /note="Description of Artificial Sequence: Synthetic Construct"
atggactggacatggatactcttcctggtagcagccgccacacgagtgcacagcgactacaaagacgatgacgacaagaactgggtgaacgtgatctccgacctgaaaaagatcgaggatttgatccagagcatgcacattgacgccaccctgtataccgagtccgacgtgcacccgagttgcaaggtgactgccatgaagtgcttcctgctggagctgcaagtgatcagcctggagagcggcgacgccagcatccacgacaccgtggaaaaccttatcattctggccaacaatagcctgagcagcaacggcaacgtgaccgaaagcggatgtaaggaatgcgaggaactggaagagaagaatatcaaagaattcctgcaaagcttcgtgcacatcgtgcagatgttcatcaacacttcttcaggtggcggtagtggtgggggaggatctggaggcggaggaagcgggggtggaggttcaggtggaggcagcttgcaatacccatacgatgttccagattacgctattacctgcccccctccgatgagcgtggagcacgccgacatctgggtcaagagctacagcttgtatagtagggagcggtacatctgtaacagcgggttcaagaggaaggccgggaccagctcactgaccgagtgcgtgttgaacaaggccaccaacgtggcccactggaccacccctagccttaagtgcatcagggacccagcgctcgtacaccagagacccgcgcctccctctacggtaaccacggcaggcgtaaccccccagcccgagagcctgtccccgagcggcaaggagcctgcagcgagcagcccctcaagcaacaacacagccgctaccaccgcggcaatcgtgcccggcagccagctgatgccctcaaagagccccagcaccggcaccactgagataagcagccacgagagctcacacggcactccctcacagaccactgccaagaattgggagctgaccgcctctgccagccaccagcccccaggcgtgtatccccagggccacagcgacaccacggtcgccatcagcacatctacagtgcttttgtgcggccttagcgccgtgtcactgctggcatgctacttgaaaagtaggcaaactccccctcttgccagtgtggaaatggaggccatggaagccctgcccgtgacctggggcaccagttctagggacgaggaccttgagaactgctcacatcatttgggatccggtgaagaaacaagagagctacagtcgttagcggctgctgtggtgccatctgcccagacccttaaaattactgactttagcttcagtgactttgagctgtctgatctggaaacagcactgtgtacaattcggatgtttactgacctcaaccttgtgcagaacttccagatgaaacatgaggttctttgcagatggattttaagtgttaagaagaattatcggaagaatgttgcctatcataattggagacatgcctttaatacagctcagtgcatgtttgctgctctaaaagcaggcaaaattcagaacaagctgactgacctggagatacttgcattgctgattgctgcactaagccacgatttggatcaccgtggtgtgaataactcttacatacagcgaagtgaacatccacttgcccagctttactgccattcaatcatggaacaccatcattttgaccagtgcctgatgattcttaatagtccaggcaatcagattctcagtggcctctccattgaagaatataagaccacgttgaaaataatcaagcaagctattttagctacagacctagcactgtacattaagagggcaggagaattttttgaacttataagaaaaaatcaattcaatttggaagatcctcatcaaaaggagttgtttttggcaatgctgatgacagcttgtgatctttctgcaattacaaaaccctggcctattcaacaacggatagcagaacttgtagcaactgaattttttgatcaaggagacagagagagaaaagaactcaacatagaacccactgatctaatgaacagggagaagaaaaacaaaatcccaagtatgcaagttgggttcatagatgccatctgcttgcaactgtatgaggccctgacccacgtgtcagaggactgtttccctttgctagatggctgcagaaagaacaggcagaaatggcaggcccttgcagaacagcagtga

SEQ ID NO: 8708 - DNA, 2226 bp, Artificial Sequence
  source: /note="Description of Artificial Sequence: Synthetic Construct"
atggactggacatggatactcttcctggtagcagccgccacacgagtgcacagcgactacaaagacgatgacgacaagaactgggtgaacgtgatctccgacctgaaaaagatcgaggatttgatccagagcatgcacattgacgccaccctgtataccgagtccgacgtgcacccgagttgcaaggtgactgccatgaagtgcttcctgctggagctgcaagtgatcagcctggagagcggcgacgccagcatccacgacaccgtggaaaaccttatcattctggccaacaatagcctgagcagcaacggcaacgtgaccgaaagcggatgtaaggaatgcgaggaactggaagagaagaatatcaaagaattcctgcaaagcttcgtgcacatcgtgcagatgttcatcaacacttcttcaggtggcggtagtggtgggggaggatctggaggcggaggaagcgggggtggaggttcaggtggaggcagcttgcaatacccatacgatgttccagattacgctattacctgcccccctccgatgagcgtggagcacgccgacatctgggtcaagagctacagcttgtatagtagggagcggtacatctgtaacagcgggttcaagaggaaggccgggaccagctcactgaccgagtgcgtgttgaacaaggccaccaacgtggcccactggaccacccctagccttaagtgcatcagggacccagcgctcgtacaccagagacccgcgcctccctctacggtaaccacggcaggcgtaaccccccagcccgagagcctgtccccgagcggcaaggagcctgcagcgagcagcccctcaagcaacaacacagccgctaccaccgcggcaatcgtgcccggcagccagctgatgccctcaaagagccccagcaccggcaccactgagataagcagccacgagagctcacacggcactccctcacagaccactgccaagaattgggagctgaccgcctctgccagccaccagcccccaggcgtgtatccccagggccacagcgacaccacggtcgccatcagcacatctacagtgcttttgtgcggccttagcgccgtgtcactgctggcatgctacttgaaaagtaggcaaactccccctcttgccagtgtggaaatggaggccatggaagccctgcccgtgacctggggcaccagttctagggacgaggaccttgagaactgctcacatcatttgggatccggtgaagaaacaagagagctacagtcgttagcggctgctgtggtgccatctgcccagacccttaaaattactgactttagcttcagtgactttgagctgtctgatctggaaacagcactgtgtacaattcggatgtttactgacctcaaccttgtgcagaacttccagatgaaacatgaggttctttgcagatggattttaagtgttaagaagaattatcggaagaatgttgcctatcataattggagacatgcctttaatacagctcagtgcatgtttgctgctctaaaagcaggcaaaattcagaacaagctgactgacctggagatacttgcattgctgattgctgcactaagccacgatttggatcaccgtggtgtgaataactcttacatacagcgaagtgaacatccacttgcccagctttactgccattcaatcatggaacaccatcattttgaccagtgcctgatgattcttaatagtccaggcaatcagattctcagtggcctctccattgaagaatataagaccacgttgaaaataatcaagcaagctattttagctacagacctagcactgtacattaagaggtatggagaattttttgaacttataagaaaaaatcaattcaatttggaagatcctcatcaaaaggagttgtttttggcaatgctgatgacagcttgtgatctttctgcaattacaaaaccctggcctattcaacaacggatagcagaacttgtagcaactgaattttttgatcaaggagacagagagagaaaagaactcaacatagaacccactgatctaatgaacagggagaagaaaaacaaaatcccaagtatgcaagttgggttcatagatgccatctgcttgcaactgtatgaggccctgacccacgtgtcagaggactgtttccctttgctagatggctgcagaaagaacaggcagaaatggcaggcccttgcagaacagcagtga

SEQ ID NO: 8709 - DNA, 2226 bp, Artificial Sequence
  source: /note="Description of Artificial Sequence: Synthetic Construct"
atggactggacatggatactcttcctggtagcagccgccacacgagtgcacagcgactacaaagacgatgacgacaagaactgggtgaacgtgatctccgacctgaaaaagatcgaggatttgatccagagcatgcacattgacgccaccctgtataccgagtccgacgtgcacccgagttgcaaggtgactgccatgaagtgcttcctgctggagctgcaagtgatcagcctggagagcggcgacgccagcatccacgacaccgtggaaaaccttatcattctggccaacaatagcctgagcagcaacggcaacgtgaccgaaagcggatgtaaggaatgcgaggaactggaagagaagaatatcaaagaattcctgcaaagcttcgtgcacatcgtgcagatgttcatcaacacttcttcaggtggcggtagtggtgggggaggatctggaggcggaggaagcgggggtggaggttcaggtggaggcagcttgcaatacccatacgatgttccagattacgctattacctgcccccctccgatgagcgtggagcacgccgacatctgggtcaagagctacagcttgtatagtagggagcggtacatctgtaacagcgggttcaagaggaaggccgggaccagctcactgaccgagtgcgtgttgaacaaggccaccaacgtggcccactggaccacccctagccttaagtgcatcagggacccagcgctcgtacaccagagacccgcgcctccctctacggtaaccacggcaggcgtaaccccccagcccgagagcctgtccccgagcggcaaggagcctgcagcgagcagcccctcaagcaacaacacagccgctaccaccgcggcaatcgtgcccggcagccagctgatgccctcaaagagccccagcaccggcaccactgagataagcagccacgagagctcacacggcactccctcacagaccactgccaagaattgggagctgaccgcctctgccagccaccagcccccaggcgtgtatccccagggccacagcgacaccacggtcgccatcagcacatctacagtgcttttgtgcggccttagcgccgtgtcactgctggcatgctacttgaaaagtaggcaaactccccctcttgccagtgtggaaatggaggccatggaagccctgcccgtgacctggggcaccagttctagggacgaggaccttgagaactgctcacatcatttgggatccggtgaagaaacaagagagctacagtcgttagcggctgctgtggtgccatctgcccagacccttaaaattactgactttagcttcagtgactttgagctgtctgatctggaaacagcactgtgtacaattcggatgtttactgacctcaaccttgtgcagaacttccagatgaaacatgaggttctttgcagatggattttaagtgttaagaagaattatcggaagaatgttgcctatcataattggagacatgcctttaatacagctcagtgcatgtttgctgctctaaaagcaggcaaaattcagaacaagctgactgacctggagatacttgcattgctgattgctgcactaagccacgatttggatcaccgtggtgtgaataactcttacatacagcgaagtgaacatccacttgcccagctttactgccattcaatcatggaacaccatcattttgaccagtgcctgatgattcttaatagtccaggcaatcagattctcagtggcctctccattgaagaatataagaccacgttgaaaataatcaagcaagctattttagctacagacctagcactgtacattaagaggcatggagaattttttgaacttataagaaaaaatcaattcaatttggaagatcctcatcaaaaggagttgtttttggcaatgctgatgacagcttgtgatctttctgcaattacaaaaccctggcctattcaacaacggatagcagaacttgtagcaactgaattttttgatcaaggagacagagagagaaaagaactcaacatagaacccactgatctaatgaacagggagaagaaaaacaaaatcccaagtatgcaagttgggttcatagatgccatctgcttgcaactgtatgaggccctgacccacgtgtcagaggactgtttccctttgctagatggctgcagaaagaacaggcagaaatggcaggcccttgcagaacagcagtga

SEQ ID NO: 8710 - DNA, 2226 bp, Artificial Sequence
  source: /note="Description of Artificial Sequence: Synthetic Construct"
atggactggacatggatactcttcctggtagcagccgccacacgagtgcacagcgactacaaagacgatgacgacaagaactgggtgaacgtgatctccgacctgaaaaagatcgaggatttgatccagagcatgcacattgacgccaccctgtataccgagtccgacgtgcacccgagttgcaaggtgactgccatgaagtgcttcctgctggagctgcaagtgatcagcctggagagcggcgacgccagcatccacgacaccgtggaaaaccttatcattctggccaacaatagcctgagcagcaacggcaacgtgaccgaaagcggatgtaaggaatgcgaggaactggaagagaagaatatcaaagaattcctgcaaagcttcgtgcacatcgtgcagatgttcatcaacacttcttcaggtggcggtagtggtgggggaggatctggaggcggaggaagcgggggtggaggttcaggtggaggcagcttgcaatacccatacgatgttccagattacgctattacctgcccccctccgatgagcgtggagcacgccgacatctgggtcaagagctacagcttgtatagtagggagcggtacatctgtaacagcgggttcaagaggaaggccgggaccagctcactgaccgagtgcgtgttgaacaaggccaccaacgtggcccactggaccacccctagccttaagtgcatcagggacccagcgctcgtacaccagagacccgcgcctccctctacggtaaccacggcaggcgtaaccccccagcccgagagcctgtccccgagcggcaaggagcctgcagcgagcagcccctcaagcaacaacacagccgctaccaccgcggcaatcgtgcccggcagccagctgatgccctcaaagagccccagcaccggcaccactgagataagcagccacgagagctcacacggcactccctcacagaccactgccaagaattgggagctgaccgcctctgccagccaccagcccccaggcgtgtatccccagggccacagcgacaccacggtcgccatcagcacatctacagtgcttttgtgcggccttagcgccgtgtcactgctggcatgctacttgaaaagtaggcaaactccccctcttgccagtgtggaaatggaggccatggaagccctgcccgtgacctggggcaccagttctagggacgaggaccttgagaactgctcacatcatttgggatccggtgaagaaacaagagagctacagtcgttagcggctgctgtggtgccatctgcccagacccttaaaattactgactttagcttcagtgactttgagctgtctgatctggaaacagcactgtgtacaattcggatgtttactgacctcaaccttgtgcagaacttccagatgaaacatgaggttctttgcagatggattttaagtgttaagaagaattatcggaagaatgttgcctatcataattggagacatgcctttaatacagctcagtgcatgtttgctgctctaaaagcaggcaaaattcagaacaagctgactgacctggagatacttgcattgctgattgctgcactaagccacgatttggatcaccgtggtgtgaataactcttacatacagcgaagtgaacatccacttgcccagctttactgccattcaatcatggaacaccatcattttgaccagtgcctgatgattcttaatagtccaggcaatcagattctcagtggcctctccattgaagaatataagaccacgttgaaaataatcaagcaagctattttagctacagacctagcactgtacattaagaggcaaggagaattttttgaacttataagaaaaaatcaattcaatttggaagatcctcatcaaaaggagttgtttttggcaatgctgatgacagcttgtgatctttctgcaattacaaaaccctggcctattcaacaacggatagcagaacttgtagcaactgaattttttgatcaaggagacagagagagaaaagaactcaacatagaacccactgatctaatgaacagggagaagaaaaacaaaatcccaagtatgcaagttgggttcatagatgccatctgcttgcaactgtatgaggccctgacccacgtgtcagaggactgtttccctttgctagatggctgcagaaagaacaggcagaaatggcaggcccttgcagaacagcagtga

SEQ ID NO: 8711 - DNA, 2226 bp, Artificial Sequence
  source: /note="Description of Artificial Sequence: Synthetic Construct"
atggactggacatggatactcttcctggtagcagccgccacacgagtgcacagcgactacaaagacgatgacgacaagaactgggtgaacgtgatctccgacctgaaaaagatcgaggatttgatccagagcatgcacattgacgccaccctgtataccgagtccgacgtgcacccgagttgcaaggtgactgccatgaagtgcttcctgctggagctgcaagtgatcagcctggagagcggcgacgccagcatccacgacaccgtggaaaaccttatcattctggccaacaatagcctgagcagcaacggcaacgtgaccgaaagcggatgtaaggaatgcgaggaactggaagagaagaatatcaaagaattcctgcaaagcttcgtgcacatcgtgcagatgttcatcaacacttcttcaggtggcggtagtggtgggggaggatctggaggcggaggaagcgggggtggaggttcaggtggaggcagcttgcaatacccatacgatgttccagattacgctattacctgcccccctccgatgagcgtggagcacgccgacatctgggtcaagagctacagcttgtatagtagggagcggtacatctgtaacagcgggttcaagaggaaggccgggaccagctcactgaccgagtgcgtgttgaacaaggccaccaacgtggcccactggaccacccctagccttaagtgcatcagggacccagcgctcgtacaccagagacccgcgcctccctctacggtaaccacggcaggcgtaaccccccagcccgagagcctgtccccgagcggcaaggagcctgcagcgagcagcccctcaagcaacaacacagccgctaccaccgcggcaatcgtgcccggcagccagctgatgccctcaaagagccccagcaccggcaccactgagataagcagccacgagagctcacacggcactccctcacagaccactgccaagaattgggagctgaccgcctctgccagccaccagcccccaggcgtgtatccccagggccacagcgacaccacggtcgccatcagcacatctacagtgcttttgtgcggccttagcgccgtgtcactgctggcatgctacttgaaaagtaggcaaactccccctcttgccagtgtggaaatggaggccatggaagccctgcccgtgacctggggcaccagttctagggacgaggaccttgagaactgctcacatcatttgggatccggtgaagaaacaagagagctacagtcgttagcggctgctgtggtgccatctgcccagacccttaaaattactgactttagcttcagtgactttgagctgtctgatctggaaacagcactgtgtacaattcggatgtttactgacctcaaccttgtgcagaacttccagatgaaacatgaggttctttgcagatggattttaagtgttaagaagaattatcggaagaatgttgcctatcataattggagacatgcctttaatacagctcagtgcatgtttgctgctctaaaagcaggcaaaattcagaacaagctgactgacctggagatacttgcattgctgattgctgcactaagccacgatttggatcaccgtggtgtgaataactcttacatacagcgaagtgaacatccacttgcccagctttactgccattcaatcatggaacaccatcattttgaccagtgcctgatgattcttaatagtccaggcaatcagattctcagtggcctctccattgaagaatataagaccacgttgaaaataatcaagcaagctattttagctacagacctagcactgtacattaagaggaatggagaattttttgaacttataagaaaaaatcaattcaatttggaagatcctcatcaaaaggagttgtttttggcaatgctgatgacagcttgtgatctttctgcaattacaaaaccctggcctattcaacaacggatagcagaacttgtagcaactgaattttttgatcaaggagacagagagagaaaagaactcaacatagaacccactgatctaatgaacagggagaagaaaaacaaaatcccaagtatgcaagttgggttcatagatgccatctgcttgcaactgtatgaggccctgacccacgtgtcagaggactgtttccctttgctagatggctgcagaaagaacaggcagaaatggcaggcccttgcagaacagcagtga

SEQ ID NO: 8712 - DNA, 2226 bp, Artificial Sequence
  source: /note="Description of Artificial Sequence: Synthetic Construct"
atggactggacatggatactcttcctggtagcagccgccacacgagtgcacagcgactacaaagacgatgacgacaagaactgggtgaacgtgatctccgacctgaaaaagatcgaggatttgatccagagcatgcacattgacgccaccctgtataccgagtccgacgtgcacccgagttgcaaggtgactgccatgaagtgcttcctgctggagctgcaagtgatcagcctggagagcggcgacgccagcatccacgacaccgtggaaaaccttatcattctggccaacaatagcctgagcagcaacggcaacgtgaccgaaagcggatgtaaggaatgcgaggaactggaagagaagaatatcaaagaattcctgcaaagcttcgtgcacatcgtgcagatgttcatcaacacttcttcaggtggcggtagtggtgggggaggatctggaggcggaggaagcgggggtggaggttcaggtggaggcagcttgcaatacccatacgatgttccagattacgctattacctgcccccctccgatgagcgtggagcacgccgacatctgggtcaagagctacagcttgtatagtagggagcggtacatctgtaacagcgggttcaagaggaaggccgggaccagctcactgaccgagtgcgtgttgaacaaggccaccaacgtggcccactggaccacccctagccttaagtgcatcagggacccagcgctcgtacaccagagacccgcgcctccctctacggtaaccacggcaggcgtaaccccccagcccgagagcctgtccccgagcggcaaggagcctgcagcgagcagcccctcaagcaacaacacagccgctaccaccgcggcaatcgtgcccggcagccagctgatgccctcaaagagccccagcaccggcaccactgagataagcagccacgagagctcacacggcactccctcacagaccactgccaagaattgggagctgaccgcctctgccagccaccagcccccaggcgtgtatccccagggccacagcgacaccacggtcgccatcagcacatctacagtgcttttgtgcggccttagcgccgtgtcactgctggcatgctacttgaaaagtaggcaaactccccctcttgccagtgtggaaatggaggccatggaagccctgcccgtgacctggggcaccagttctagggacgaggaccttgagaactgctcacatcatttgggatccggtgaagaaacaagagagctacagtcgttagcggctgctgtggtgccatctgcccagacccttaaaattactgactttagcttcagtgactttgagctgtctgatctggaaacagcactgtgtacaattcggatgtttactgacctcaaccttgtgcagaacttccagatgaaacatgaggttctttgcagatggattttaagtgttaagaagaattatcggaagaatgttgcctatcataattggagacatgcctttaatacagctcagtgcatgtttgctgctctaaaagcaggcaaaattcagaacaagctgactgacctggagatacttgcattgctgattgctgcactaagccacgatttggatcaccgtggtgtgaataactcttacatacagcgaagtgaacatccacttgcccagctttactgccattcaatcatggaacaccatcattttgaccagtgcctgatgattcttaatagtccaggcaatcagattctcagtggcctctccattgaagaatataagaccacgttgaaaataatcaagcaagctattttagctacagacctagcactgtacattaagaggaaaggagaattttttgaacttataagaaaaaatcaattcaatttggaagatcctcatcaaaaggagttgtttttggcaatgctgatgacagcttgtgatctttctgcaattacaaaaccctggcctattcaacaacggatagcagaacttgtagcaactgaattttttgatcaaggagacagagagagaaaagaactcaacatagaacccactgatctaatgaacagggagaagaaaaacaaaatcccaagtatgcaagttgggttcatagatgccatctgcttgcaactgtatgaggccctgacccacgtgtcagaggactgtttccctttgctagatggctgcagaaagaacaggcagaaatggcaggcccttgcagaacagcagtga

SEQ ID NO: 8713 - DNA, 2226 bp, Artificial Sequence
  source: /note="Description of Artificial Sequence: Synthetic Construct"
atggactggacatggatactcttcctggtagcagccgccacacgagtgcacagcgactacaaagacgatgacgacaagaactgggtgaacgtgatctccgacctgaaaaagatcgaggatttgatccagagcatgcacattgacgccaccctgtataccgagtccgacgtgcacccgagttgcaaggtgactgccatgaagtgcttcctgctggagctgcaagtgatcagcctggagagcggcgacgccagcatccacgacaccgtggaaaaccttatcattctggccaacaatagcctgagcagcaacggcaacgtgaccgaaagcggatgtaaggaatgcgaggaactggaagagaagaatatcaaagaattcctgcaaagcttcgtgcacatcgtgcagatgttcatcaacacttcttcaggtggcggtagtggtgggggaggatctggaggcggaggaagcgggggtggaggttcaggtggaggcagcttgcaatacccatacgatgttccagattacgctattacctgcccccctccgatgagcgtggagcacgccgacatctgggtcaagagctacagcttgtatagtagggagcggtacatctgtaacagcgggttcaagaggaaggccgggaccagctcactgaccgagtgcgtgttgaacaaggccaccaacgtggcccactggaccacccctagccttaagtgcatcagggacccagcgctcgtacaccagagacccgcgcctccctctacggtaaccacggcaggcgtaaccccccagcccgagagcctgtccccgagcggcaaggagcctgcagcgagcagcccctcaagcaacaacacagccgctaccaccgcggcaatcgtgcccggcagccagctgatgccctcaaagagccccagcaccggcaccactgagataagcagccacgagagctcacacggcactccctcacagaccactgccaagaattgggagctgaccgcctctgccagccaccagcccccaggcgtgtatccccagggccacagcgacaccacggtcgccatcagcacatctacagtgcttttgtgcggccttagcgccgtgtcactgctggcatgctacttgaaaagtaggcaaactccccctcttgccagtgtggaaatggaggccatggaagccctgcccgtgacctggggcaccagttctagggacgaggaccttgagaactgctcacatcatttgggatccggtgaagaaacaagagagctacagtcgttagcggctgctgtggtgccatctgcccagacccttaaaattactgactttagcttcagtgactttgagctgtctgatctggaaacagcactgtgtacaattcggatgtttactgacctcaaccttgtgcagaacttccagatgaaacatgaggttctttgcagatggattttaagtgttaagaagaattatcggaagaatgttgcctatcataattggagacatgcctttaatacagctcagtgcatgtttgctgctctaaaagcaggcaaaattcagaacaagctgactgacctggagatacttgcattgctgattgctgcactaagccacgatttggatcaccgtggtgtgaataactcttacatacagcgaagtgaacatccacttgcccagctttactgccattcaatcatggaacaccatcattttgaccagtgcctgatgattcttaatagtccaggcaatcagattctcagtggcctctccattgaagaatataagaccacgttgaaaataatcaagcaagctattttagctacagacctagcactgtacattaagagggacggagaattttttgaacttataagaaaaaatcaattcaatttggaagatcctcatcaaaaggagttgtttttggcaatgctgatgacagcttgtgatctttctgcaattacaaaaccctggcctattcaacaacggatagcagaacttgtagcaactgaattttttgatcaaggagacagagagagaaaagaactcaacatagaacccactgatctaatgaacagggagaagaaaaacaaaatcccaagtatgcaagttgggttcatagatgccatctgcttgcaactgtatgaggccctgacccacgtgtcagaggactgtttccctttgctagatggctgcagaaagaacaggcagaaatggcaggcccttgcagaacagcagtga

SEQ ID NO: 8714 - DNA, 2226 bp, Artificial Sequence
  source: /note="Description of Artificial Sequence: Synthetic Construct"
atggactggacatggatactcttcctggtagcagccgccacacgagtgcacagcgactacaaagacgatgacgacaagaactgggtgaacgtgatctccgacctgaaaaagatcgaggatttgatccagagcatgcacattgacgccaccctgtataccgagtccgacgtgcacccgagttgcaaggtgactgccatgaagtgcttcctgctggagctgcaagtgatcagcctggagagcggcgacgccagcatccacgacaccgtggaaaaccttatcattctggccaacaatagcctgagcagcaacggcaacgtgaccgaaagcggatgtaaggaatgcgaggaactggaagagaagaatatcaaagaattcctgcaaagcttcgtgcacatcgtgcagatgttcatcaacacttcttcaggtggcggtagtggtgggggaggatctggaggcggaggaagcgggggtggaggttcaggtggaggcagcttgcaatacccatacgatgttccagattacgctattacctgcccccctccgatgagcgtggagcacgccgacatctgggtcaagagctacagcttgtatagtagggagcggtacatctgtaacagcgggttcaagaggaaggccgggaccagctcactgaccgagtgcgtgttgaacaaggccaccaacgtggcccactggaccacccctagccttaagtgcatcagggacccagcgctcgtacaccagagacccgcgcctccctctacggtaaccacggcaggcgtaaccccccagcccgagagcctgtccccgagcggcaaggagcctgcagcgagcagcccctcaagcaacaacacagccgctaccaccgcggcaatcgtgcccggcagccagctgatgccctcaaagagccccagcaccggcaccactgagataagcagccacgagagctcacacggcactccctcacagaccactgccaagaattgggagctgaccgcctctgccagccaccagcccccaggcgtgtatccccagggccacagcgacaccacggtcgccatcagcacatctacagtgcttttgtgcggccttagcgccgtgtcactgctggcatgctacttgaaaagtaggcaaactccccctcttgccagtgtggaaatggaggccatggaagccctgcccgtgacctggggcaccagttctagggacgaggaccttgagaactgctcacatcatttgggatccggtgaagaaacaagagagctacagtcgttagcggctgctgtggtgccatctgcccagacccttaaaattactgactttagcttcagtgactttgagctgtctgatctggaaacagcactgtgtacaattcggatgtttactgacctcaaccttgtgcagaacttccagatgaaacatgaggttctttgcagatggattttaagtgttaagaagaattatcggaagaatgttgcctatcataattggagacatgcctttaatacagctcagtgcatgtttgctgctctaaaagcaggcaaaattcagaacaagctgactgacctggagatacttgcattgctgattgctgcactaagccacgatttggatcaccgtggtgtgaataactcttacatacagcgaagtgaacatccacttgcccagctttactgccattcaatcatggaacaccatcattttgaccagtgcctgatgattcttaatagtccaggcaatcagattctcagtggcctctccattgaagaatataagaccacgttgaaaataatcaagcaagctattttagctacagacctagcactgtacattaagagggaaggagaattttttgaacttataagaaaaaatcaattcaatttggaagatcctcatcaaaaggagttgtttttggcaatgctgatgacagcttgtgatctttctgcaattacaaaaccctggcctattcaacaacggatagcagaacttgtagcaactgaattttttgatcaaggagacagagagagaaaagaactcaacatagaacccactgatctaatgaacagggagaagaaaaacaaaatcccaagtatgcaagttgggttcatagatgccatctgcttgcaactgtatgaggccctgacccacgtgtcagaggactgtttccctttgctagatggctgcagaaagaacaggcagaaatggcaggcccttgcagaacagcagtga

SEQ ID NO: 8715 - DNA, 2226 bp, Artificial Sequence
  source: /note="Description of Artificial Sequence: Synthetic Construct"
atggactggacatggatactcttcctggtagcagccgccacacgagtgcacagcgactacaaagacgatgacgacaagaactgggtgaacgtgatctccgacctgaaaaagatcgaggatttgatccagagcatgcacattgacgccaccctgtataccgagtccgacgtgcacccgagttgcaaggtgactgccatgaagtgcttcctgctggagctgcaagtgatcagcctggagagcggcgacgccagcatccacgacaccgtggaaaaccttatcattctggccaacaatagcctgagcagcaacggcaacgtgaccgaaagcggatgtaaggaatgcgaggaactggaagagaagaatatcaaagaattcctgcaaagcttcgtgcacatcgtgcagatgttcatcaacacttcttcaggtggcggtagtggtgggggaggatctggaggcggaggaagcgggggtggaggttcaggtggaggcagcttgcaatacccatacgatgttccagattacgctattacctgcccccctccgatgagcgtggagcacgccgacatctgggtcaagagctacagcttgtatagtagggagcggtacatctgtaacagcgggttcaagaggaaggccgggaccagctcactgaccgagtgcgtgttgaacaaggccaccaacgtggcccactggaccacccctagccttaagtgcatcagggacccagcgctcgtacaccagagacccgcgcctccctctacggtaaccacggcaggcgtaaccccccagcccgagagcctgtccccgagcggcaaggagcctgcagcgagcagcccctcaagcaacaacacagccgctaccaccgcggcaatcgtgcccggcagccagctgatgccctcaaagagccccagcaccggcaccactgagataagcagccacgagagctcacacggcactccctcacagaccactgccaagaattgggagctgaccgcctctgccagccaccagcccccaggcgtgtatccccagggccacagcgacaccacggtcgccatcagcacatctacagtgcttttgtgcggccttagcgccgtgtcactgctggcatgctacttgaaaagtaggcaaactccccctcttgccagtgtggaaatggaggccatggaagccctgcccgtgacctggggcaccagttctagggacgaggaccttgagaactgctcacatcatttgggatccggtgaagaaacaagagagctacagtcgttagcggctgctgtggtgccatctgcccagacccttaaaattactgactttagcttcagtgactttgagctgtctgatctggaaacagcactgtgtacaattcggatgtttactgacctcaaccttgtgcagaacttccagatgaaacatgaggttctttgcagatggattttaagtgttaagaagaattatcggaagaatgttgcctatcataattggagacatgcctttaatacagctcagtgcatgtttgctgctctaaaagcaggcaaaattcagaacaagctgactgacctggagatacttgcattgctgattgctgcactaagccacgatttggatcaccgtggtgtgaataactcttacatacagcgaagtgaacatccacttgcccagctttactgccattcaatcatggaacaccatcattttgaccagtgcctgatgattcttaatagtccaggcaatcagattctcagtggcctctccattgaagaatataagaccacgttgaaaataatcaagcaagctattttagctacagacctagcactgtacattaagaggtgtggagaattttttgaacttataagaaaaaatcaattcaatttggaagatcctcatcaaaaggagttgtttttggcaatgctgatgacagcttgtgatctttctgcaattacaaaaccctggcctattcaacaacggatagcagaacttgtagcaactgaattttttgatcaaggagacagagagagaaaagaactcaacatagaacccactgatctaatgaacagggagaagaaaaacaaaatcccaagtatgcaagttgggttcatagatgccatctgcttgcaactgtatgaggccctgacccacgtgtcagaggactgtttccctttgctagatggctgcagaaagaacaggcagaaatggcaggcccttgcagaacagcagtga

SEQ ID NO: 8716 - DNA, 2226 bp, Artificial Sequence
  source: /note="Description of Artificial Sequence: Synthetic Construct"
atggactggacatggatactcttcctggtagcagccgccacacgagtgcacagcgactacaaagacgatgacgacaagaactgggtgaacgtgatctccgacctgaaaaagatcgaggatttgatccagagcatgcacattgacgccaccctgtataccgagtccgacgtgcacccgagttgcaaggtgactgccatgaagtgcttcctgctggagctgcaagtgatcagcctggagagcggcgacgccagcatccacgacaccgtggaaaaccttatcattctggccaacaatagcctgagcagcaacggcaacgtgaccgaaagcggatgtaaggaatgcgaggaactggaagagaagaatatcaaagaattcctgcaaagcttcgtgcacatcgtgcagatgttcatcaacacttcttcaggtggcggtagtggtgggggaggatctggaggcggaggaagcgggggtggaggttcaggtggaggcagcttgcaatacccatacgatgttccagattacgctattacctgcccccctccgatgagcgtggagcacgccgacatctgggtcaagagctacagcttgtatagtagggagcggtacatctgtaacagcgggttcaagaggaaggccgggaccagctcactgaccgagtgcgtgttgaacaaggccaccaacgtggcccactggaccacccctagccttaagtgcatcagggacccagcgctcgtacaccagagacccgcgcctccctctacggtaaccacggcaggcgtaaccccccagcccgagagcctgtccccgagcggcaaggagcctgcagcgagcagcccctcaagcaacaacacagccgctaccaccgcggcaatcgtgcccggcagccagctgatgccctcaaagagccccagcaccggcaccactgagataagcagccacgagagctcacacggcactccctcacagaccactgccaagaattgggagctgaccgcctctgccagccaccagcccccaggcgtgtatccccagggccacagcgacaccacggtcgccatcagcacatctacagtgcttttgtgcggccttagcgccgtgtcactgctggcatgctacttgaaaagtaggcaaactccccctcttgccagtgtggaaatggaggccatggaagccctgcccgtgacctggggcaccagttctagggacgaggaccttgagaactgctcacatcatttgggatccggtgaagaaacaagagagctacagtcgttagcggctgctgtggtgccatctgcccagacccttaaaattactgactttagcttcagtgactttgagctgtctgatctggaaacagcactgtgtacaattcggatgtttactgacctcaaccttgtgcagaacttccagatgaaacatgaggttctttgcagatggattttaagtgttaagaagaattatcggaagaatgttgcctatcataattggagacatgcctttaatacagctcagtgcatgtttgctgctctaaaagcaggcaaaattcagaacaagctgactgacctggagatacttgcattgctgattgctgcactaagccacgatttggatcaccgtggtgtgaataactcttacatacagcgaagtgaacatccacttgcccagctttactgccattcaatcatggaacaccatcattttgaccagtgcctgatgattcttaatagtccaggcaatcagattctcagtggcctctccattgaagaatataagaccacgttgaaaataatcaagcaagctattttagctacagacctagcactgtacattaagaggggaggagaattttttgaacttataagaaaaaatcaattcaatttggaagatcctcatcaaaaggagttgtttttggcaatgctgatgacagcttgtgatctttctgcaattacaaaaccctggcctattcaacaacggatagcagaacttgtagcaactgaattttttgatcaaggagacagagagagaaaagaactcaacatagaacccactgatctaatgaacagggagaagaaaaacaaaatcccaagtatgcaagttgggttcatagatgccatctgcttgcaactgtatgaggccctgacccacgtgtcagaggactgtttccctttgctagatggctgcagaaagaacaggcagaaatggcaggcccttgcagaacagcagtga

SEQ ID NO: 8717 - DNA, 2226 bp, Artificial Sequence
  source: /note="Description of Artificial Sequence: Synthetic Construct"
atggactggacatggatactcttcctggtagcagccgccacacgagtgcacagcgactacaaagacgatgacgacaagaactgggtgaacgtgatctccgacctgaaaaagatcgaggatttgatccagagcatgcacattgacgccaccctgtataccgagtccgacgtgcacccgagttgcaaggtgactgccatgaagtgcttcctgctggagctgcaagtgatcagcctggagagcggcgacgccagcatccacgacaccgtggaaaaccttatcattctggccaacaatagcctgagcagcaacggcaacgtgaccgaaagcggatgtaaggaatgcgaggaactggaagagaagaatatcaaagaattcctgcaaagcttcgtgcacatcgtgcagatgttcatcaacacttcttcaggtggcggtagtggtgggggaggatctggaggcggaggaagcgggggtggaggttcaggtggaggcagcttgcaatacccatacgatgttccagattacgctattacctgcccccctccgatgagcgtggagcacgccgacatctgggtcaagagctacagcttgtatagtagggagcggtacatctgtaacagcgggttcaagaggaaggccgggaccagctcactgaccgagtgcgtgttgaacaaggccaccaacgtggcccactggaccacccctagccttaagtgcatcagggacccagcgctcgtacaccagagacccgcgcctccctctacggtaaccacggcaggcgtaaccccccagcccgagagcctgtccccgagcggcaaggagcctgcagcgagcagcccctcaagcaacaacacagccgctaccaccgcggcaatcgtgcccggcagccagctgatgccctcaaagagccccagcaccggcaccactgagataagcagccacgagagctcacacggcactccctcacagaccactgccaagaattgggagctgaccgcctctgccagccaccagcccccaggcgtgtatccccagggccacagcgacaccacggtcgccatcagcacatctacagtgcttttgtgcggccttagcgccgtgtcactgctggcatgctacttgaaaagtaggcaaactccccctcttgccagtgtggaaatggaggccatggaagccctgcccgtgacctggggcaccagttctagggacgaggaccttgagaactgctcacatcatttgggatccggtgaagaaacaagagagctacagtcgttagcggctgctgtggtgccatctgcccagacccttaaaattactgactttagcttcagtgactttgagctgtctgatctggaaacagcactgtgtacaattcggatgtttactgacctcaaccttgtgcagaacttccagatgaaacatgaggttctttgcagatggattttaagtgttaagaagaattatcggaagaatgttgcctatcataattggagacatgcctttaatacagctcagtgcatgtttgctgctctaaaagcaggcaaaattcagaacaagctgactgacctggagatacttgcattgctgattgctgcactaagccacgatttggatcaccgtggtgtgaataactcttacatacagcgaagtgaacatccacttgcccagctttactgccattcaatcatggaacaccatcattttgaccagtgcctgatgattcttaatagtccaggcaatcagattctcagtggcctctccattgaagaatataagaccacgttgaaaataatcaagcaagctattttagctacagacctagcactgtacattaagaggtggggagaattttttgaacttataagaaaaaatcaattcaatttggaagatcctcatcaaaaggagttgtttttggcaatgctgatgacagcttgtgatctttctgcaattacaaaaccctggcctattcaacaacggatagcagaacttgtagcaactgaattttttgatcaaggagacagagagagaaaagaactcaacatagaacccactgatctaatgaacagggagaagaaaaacaaaatcccaagtatgcaagttgggttcatagatgccatctgcttgcaactgtatgaggccctgacccacgtgtcagaggactgtttccctttgctagatggctgcagaaagaacaggcagaaatggcaggcccttgcagaacagcagtga

SEQ ID NO: 8718 - DNA, 2226 bp, Artificial Sequence
  source: /note="Description of Artificial Sequence: Synthetic Construct"
atggactggacatggatactcttcctggtagcagccgccacacgagtgcacagcgactacaaagacgatgacgacaagaactgggtgaacgtgatctccgacctgaaaaagatcgaggatttgatccagagcatgcacattgacgccaccctgtataccgagtccgacgtgcacccgagttgcaaggtgactgccatgaagtgcttcctgctggagctgcaagtgatcagcctggagagcggcgacgccagcatccacgacaccgtggaaaaccttatcattctggccaacaatagcctgagcagcaacggcaacgtgaccgaaagcggatgtaaggaatgcgaggaactggaagagaagaatatcaaagaattcctgcaaagcttcgtgcacatcgtgcagatgttcatcaacacttcttcaggtggcggtagtggtgggggaggatctggaggcggaggaagcgggggtggaggttcaggtggaggcagcttgcaatacccatacgatgttccagattacgctattacctgcccccctccgatgagcgtggagcacgccgacatctgggtcaagagctacagcttgtatagtagggagcggtacatctgtaacagcgggttcaagaggaaggccgggaccagctcactgaccgagtgcgtgttgaacaaggccaccaacgtggcccactggaccacccctagccttaagtgcatcagggacccagcgctcgtacaccagagacccgcgcctccctctacggtaaccacggcaggcgtaaccccccagcccgagagcctgtccccgagcggcaaggagcctgcagcgagcagcccctcaagcaacaacacagccgctaccaccgcggcaatcgtgcccggcagccagctgatgccctcaaagagccccagcaccggcaccactgagataagcagccacgagagctcacacggcactccctcacagaccactgccaagaattgggagctgaccgcctctgccagccaccagcccccaggcgtgtatccccagggccacagcgacaccacggtcgccatcagcacatctacagtgcttttgtgcggccttagcgccgtgtcactgctggcatgctacttgaaaagtaggcaaactccccctcttgccagtgtggaaatggaggccatggaagccctgcccgtgacctggggcaccagttctagggacgaggaccttgagaactgctcacatcatttgggatccggtgaagaaacaagagagctacagtcgttagcggctgctgtggtgccatctgcccagacccttaaaattactgactttagcttcagtgactttgagctgtctgatctggaaacagcactgtgtacaattcggatgtttactgacctcaaccttgtgcagaacttccagatgaaacatgaggttctttgcagatggattttaagtgttaagaagaattatcggaagaatgttgcctatcataattggagacatgcctttaatacagctcagtgcatgtttgctgctctaaaagcaggcaaaattcagaacaagctgactgacctggagatacttgcattgctgattgctgcactaagccacgatttggatcaccgtggtgtgaataactcttacatacagcgaagtgaacatccacttgcccagctttactgccattcaatcatggaacaccatcattttgaccagtgcctgatgattcttaatagtccaggcaatcagattctcagtggcctctccattgaagaatataagaccacgttgaaaataatcaagcaagctattttagctacagacctagcactgtacattaagaggacgggagaattttttgaacttataagaaaaaatcaattcaatttggaagatcctcatcaaaaggagttgtttttggcaatgctgatgacagcttgtgatctttctgcaattacaaaaccctggcctattcaacaacggatagcagaacttgtagcaactgaattttttgatcaaggagacagagagagaaaagaactcaacatagaacccactgatctaatgaacagggagaagaaaaacaaaatcccaagtatgcaagttgggttcatagatgccatctgcttgcaactgtatgaggccctgacccacgtgtcagaggactgtttccctttgctagatggctgcagaaagaacaggcagaaatggcaggcccttgcagaacagcagtga

SEQ ID NO: 8719 - DNA, 30 bp, Artificial Sequence
  source: /note="Description of Artificial Sequence: Synthetic Primer"
actagaggatctatttccggtgaattcatg

SEQ ID NO: 8720 - DNA, 22 bp, Artificial Sequence
  source: /note="Description of Artificial Sequence: Synthetic Primer"
ggatcctccaccactgcctcca

SEQ ID NO: 8721 - protein, 326 aa, Artificial Sequence
  source: /note="Description of Artificial Sequence: Synthetic Destabilizing Domain (DD)"
EETRELQSLAAAVVPSAQTLKITDFSFSDFELSDLETALCTIRMFTDLNLVQNFQMKHEVLCRWILSVKKNYRKNVAYHNWRHAFNTAQCMFAALKAGKIQNKLTDLEILALLIAALSHDLDHRGVNNSYIQRSEHPLAQLYCHSIMEHHHFDQCLMILNSPGNQILSGLSIEEYKTTLKIIKQAILATDLALYIKRDGEFSELIRKNQFNLEDPHQKELFLAMLMTACDLSAITKPWPIQQRIAELVATEFFDQGDRERKELNIEPTDLMNREKKNKIPSMQVGFIDAICLQLYEALTHVSEDCFPLLDGCRKNRQKWQALAEQQ

SEQ ID NO: 8722 - protein, 326 aa, Artificial Sequence
  source: /note="Description of Artificial Sequence: Synthetic Destabilizing Domain (DD)"
EETRELQSLAAAVVPSAQTLKITDFSFSDFELSDLETALCTIRMFTDLNLVQNFQMKHEVLCRWILSVKKNYRKNVAYHNWRHAFNTAQCMFAALKAGKIQNKLTDLEILALLIAALSHDLDHRGVNNSYIQRSEHPLAQLYCHSIMEHHHFDQCLMILNSPGNQILSGLSIEEYKTTLKIIKQAILATDLALYIKREGEFDELIRKNQFNLEDPHQKELFLAMLMTACDLSAITKPWPIQQRIAELVATEFFDQGDRERKELNIEPTDLMNREKKNKIPSMQVGFIDAICLQLYEALTHVSEDCFPLLDGCRKNRQKWQALAEQQ

SEQ ID NO: 8723 - protein, 326 aa, Artificial Sequence
  source: /note="Description of Artificial Sequence: Synthetic Destabilizing Domain (DD)"
EETRELQSLAAAVVPSAQTLKITDFSFSDFELSDLETALCTIRMFTDLNLVQNFQMKHEVLCRWILSVKKNYRKNVAYHNWRHAFNTAQCMFAALKAGKIQNKLTDLEILALLIAALSHDLDHRGVNNSYIQRSEHPLAQLYCHSIMEHHHFDQCLMILNSPGNQILSGLSIEEYKTTLKIIKQAILATDLALYIKRVGEFGELIRKNQFNLEDPHQKELFLAMLMTACDLSAITKPWPIQQRIAELVATEFFDQGDRERKELNIEPTDLMNREKKNKIPSMQVGFIDAICLQLYEALTHVSEDCFPLLDGCRKNRQKWQALAEQQ

SEQ ID NO: 8724 - protein, 326 aa, Artificial Sequence
  source: /note="Description of Artificial Sequence: Synthetic Destabilizing Domain (DD)"
EETRELQSLAAAVVPSAQTLKITDFSFSDFELSDLETALCTIRMFTDLNLVQNFQMKHEVLCRWILSVKKNYRKNVAYHNWRHAFNTAQCMFAALKAGKIQNKLTDLEILALLIAALSHDLDHRGVNNSYIQRSEHPLAQLYCHSIMEHHHFDQCLMILNSPGNQILSGLSIEEYKTTLKIIKQAILATDLALYIKRWGEFGELIRKNQFNLEDPHQKELFLAMLMTACDLSAITKPWPIQQRIAELVATEFFDQGDRERKELNIEPTDLMNREKKNKIPSMQVGFIDAICLQLYEALTHVSEDCFPLLDGCRKNRQKWQALAEQQ

SEQ ID NO: 8725 - protein, 326 aa, Artificial Sequence
  source: /note="Description of Artificial Sequence: Synthetic Destabilizing Domain (DD)"
EETRELQSLAAAVVPSAQTLKITDFSFSDFELSDLETALCTIRMFTDLNLVQNFQMKHEVLCRWILSVKKNYRKNVAYHNWRHAFNTAQCMFAALKAGKIQNKLTDLEILALLIAALSHDLDHRGVNNSYIQRSEHPLAQLYCHSIMEHHHFDQCLMILNSPGNQILSGLSIEEYKTTLKIIKQAILATDLALYIKRWGEFVELIRKNQFNLEDPHQKELFLAMLMTACDLSAITKPWPIQQRIAELVATEFFDQGDRERKELNIEPTDLMNREKKNKIPSMQVGFIDAICLQLYEALTHVSEDCFPLLDGCRKNRQKWQALAEQQ

SEQ ID NO: 8726 - protein, 326 aa, Artificial Sequence
  source: /note="Description of Artificial Sequence: Synthetic Destabilizing Domain (DD)"
EETRELQSLAAAVVPSAQTLKITDFSFSDFELSDLETALCTIRMFTDLNLVQNFQMKHEVLCRWILSVKKNYRKNVAYHNWRHAFNTAQCMFAALKAGKIQNKLTDLEILALLIAALSHDLDHRGVNNSYIQRSEHPLAQLYCHSIMEHHHFDQCLMILNSPGNQILSGLSIEEYKTTLKIIKQAILATDLALYIKRLGEFWELIRKNQFNLEDPHQKELFLAMLMTACDLSAITKPWPIQQRIAELVATEFFDQGDRERKELNIEPTDLMNREKKNKIPSMQVGFIDAICLQLYEALTHVSEDCFPLLDGCRKNRQKWQALAEQQ

SEQ ID NO: 8727 - protein, 326 aa, Artificial Sequence
  source: /note="Description of Artificial Sequence: Synthetic Destabilizing Domain (DD)"
EETRELQSLAAAVVPSAQTLKITDFSFSDFELSDLETALCTIRMFTDLNLVQNFQMKHEVLCRWILSVKKNYRKNVAYHNWRHAFNTAQCMFAALKAGKIQNKLTDLEILALLIAALSHDLDHRGVNNSYIQRSEHPLAQLYCHSIMEHHHFDQCLMILNSPGNQILSGLSIEEYKTTLKIIKQAILATDLALYIKRPGEFQELIRKNQFNLEDPHQKELFLAMLMTACDLSAITKPWPIQQRIAELVATEFFDQGDRERKELNIEPTDLMNREKKNKIPSMQVGFIDAICLQLYEALTHVSEDCFPLLDGCRKNRQKWQALAEQQ

SEQ ID NO: 8728 - protein, 326 aa, Artificial Sequence
  source: /note="Description of Artificial Sequence: Synthetic Destabilizing Domain (DD)"
EETRELQSLAAAVVPSAQTLKITDFSFSDFELSDLETALCTIRMFTDLNLVQNFQMKHEVLCRWILSVKKNYRKNVAYHNWRHAFNTAQCMFAALKAGKIQNKLTDLEILALLIAALSHDLDHRGVNNSYIQRSEHPLAQLYCHSIMEHHHFDQCLMILNSPGNQILSGLSIEEYKTTLKIIKQAILATDLALYIKRAGEFAELIRKNQFNLEDPHQKELFLAMLMTACDLSAITKPWPIQQRIAELVATEFFDQGDRERKELNIEPTDLMNREKKNKIPSMQVGFIDAICLQLYEALTHVSEDCFPLLDGCRKNRQKWQALAEQQ

SEQ ID NO: 8729 - protein, 326 aa, Artificial Sequence
  source: /note="Description of Artificial Sequence: Synthetic Destabilizing Domain (DD)"
EETRELQSLAAAVVPSAQTLKITDFSFSDFELSDLETALCTIRMFTDLNLVQNFQMKHEVLCRWILSVKKNYRKNVAYHNWRHAFNTAQCMFAALKAGKIQNKLTDLEILALLIAALSHDLDHRGVNNSYIQRSEHPLAQLYCHSIMEHHHFDQCLMILNSPGNQILSGLSIEEYKTTLKIIKQAILATDLALYIKRSGEFGELIRKNQFNLEDPHQKELFLAMLMTACDLSAITKPWPIQQRIAELVATEFFDQGDRERKELNIEPTDLMNREKKNKIPSMQVGFIDAICLQLYEALTHVSEDCFPLLDGCRKNRQKWQALAEQQ

SEQ ID NO: 8730 - protein, 326 aa, Artificial Sequence
  source: /note="Description of Artificial Sequence: Synthetic Destabilizing Domain (DD)"
EETRELQSLAAAVVPSAQTLKITDFSFSDFELSDLETALCTIRMFTDLNLVQNFQMKHEVLCRWILSVKKNYRKNVAYHNWRHAFNTAQCMFAALKAGKIQNKLTDLEILALLIAALSHDLDHRGVNNSYIQRSEHPLAQLYCHSIMEHHHFDQCLMILNSPGNQILSGLSIEEYKTTLKIIKQAILATDLALYIKRTGEFPELIRKNQFNLEDPHQKELFLAMLMTACDLSAITKPWPIQQRIAELVATEFFDQGDRERKELNIEPTDLMNREKKNKIPSMQVGFIDAICLQLYEALTHVSEDCFPLLDGCRKNRQKWQALAEQQ

SEQ ID NO: 8731 - protein, 326 aa, Artificial Sequence
  source: /note="Description of Artificial Sequence: Synthetic Destabilizing Domain (DD)"
EETRELQSLAAAVVPSAQTLKITDFSFSDFELSDLETALCTIRMFTDLNLVQNFQMKHEVLCRWILSVKKNYRKNVAYHNWRHAFNTAQCMFAALKAGKIQNKLTDLEILALLIAALSHDLDHRGVNNSYIQRSEHPLAQLYCHSIMEHHHFDQCLMILNSPGNQILSGLSIEEYKTTLKIIKQAILATDLALYIKRMGEFHELIRKNQFNLEDPHQKELFLAMLMTACDLSAITKPWPIQQRIAELVATEFFDQGDRERKELNIEPTDLMNREKKNKIPSMQVGFIDAICLQLYEALTHVSEDCFPLLDGCRKNRQKWQALAEQQ

SEQ ID NO: 8732 - protein, 326 aa, Artificial Sequence
  source: /note="Description of Artificial Sequence: Synthetic Destabilizing Domain (DD)"
EETRELQSLAAAVVPSAQTLKITDFSFSDFELSDLETALCTIRMFTDLNLVQNFQMKHEVLCRWILSVKKNYRKNVAYHNWRHAFNTAQCMFAALKAGKIQNKLTDLEILALLIAALSHDLDHRGVNNSYIQRSEHPLAQLYCHSIMEHHHFDQCLMILNSPGNQILSGLSIEEYKTTLKIIKQAILATDLALYIKRYGEFMELIRKNQFNLEDPHQKELFLAMLMTACDLSAITKPWPIQQRIAELVATEFFDQGDRERKELNIEPTDLMNREKKNKIPSMQVGFIDAICLQLYEALTHVSEDCFPLLDGCRKNRQKWQALAEQQ

SEQ ID NO: 8733 - protein, 326 aa, Artificial Sequence
  source: /note="Description of Artificial Sequence: Synthetic Destabilizing Domain (DD)"
EETRELQSLAAAVVPSAQTLKITDFSFSDFELSDLETALCTIRMFTDLNLVQNFQMKHEVLCRWILSVKKNYRKNVAYHNWRHAFNTAQCMFAALKAGKIQNKLTDLEILALLIAALSHDLDHRGVNNSYIQRSEHPLAQLYCHSIMEHHHFDQCLMILNSPGNQILSGLSIEEYKTTLKIIKQAILATDLALYIKRPGEFDELIRKNQFNLEDPHQKELFLAMLMTACDLSAITKPWPIQQRIAELVATEFFDQGDRERKELNIEPTDLMNREKKNKIPSMQVGFIDAICLQLYEALTHVSEDCFPLLDGCRKNRQKWQALAEQQ

SEQ ID NO: 8734 - protein, 326 aa, Artificial Sequence
  source: /note="Description of Artificial Sequence: Synthetic Destabilizing Domain (DD)"
EETRELQSLAAAVVPSAQTLKITDFSFSDFELSDLETALCTIRMFTDLNLVQNFQMKHEVLCRWILSVKKNYRKNVAYHNWRHAFNTAQCMFAALKAGKIQNKLTDLEILALLIAALSHDLDHRGVNNSYIQRSEHPLAQLYCHSIMEHHHFDQCLMILNSPGNQILSGLSIEEYKTTLKIIKQAILATDLALYIKRPGEFGELIRKNQFNLEDPHQKELFLAMLMTACDLSAITKPWPIQQRIAELVATEFFDQGDRERKELNIEPTDLMNREKKNKIPSMQVGFIDAICLQLYEALTHVSEDCFPLLDGCRKNRQKWQALAEQQ

SEQ ID NO: 8735 - protein, 326 aa, Artificial Sequence
  source: /note="Description of Artificial Sequence: Synthetic Destabilizing Domain (DD)"
EETRELQSLAAAVVPSAQTLKITDFSFSDFELSDLETALCTIRMFTDLNLVQNFQMKHEVLCRWILSVKKNYRKNVAYHNWRHAFNTAQCMFAALKAGKIQNKLTDLEILALLIAALSHDLDHRGVNNSYIQRSEHPLAQLYCHSIMEHHHFDQCLMILNSPGNQILSGLSIEEYKTTLKIIKQAILATDLALYIKRWGEFLELIRKNQFNLEDPHQKELFLAMLMTACDLSAITKPWPIQQRIAELVATEFFDQGDRERKELNIEPTDLMNREKKNKIPSMQVGFIDAICLQLYEALTHVSEDCFPLLDGCRKNRQKWQALAEQQ

SEQ ID NO: 8736 - protein, 326 aa, Artificial Sequence
  source: /note="Description of Artificial Sequence: Synthetic Destabilizing Domain (DD)"
EETRELQSLAAAVVPSAQTLKITDFSFSDFELSDLETALCTIRMFTDLNLVQNFQMKHEVLCRWILSVKKNYRKNVAYHNWRHAFNTAQCMFAALKAGKIQNKLTDLEILALLIAALSHDLDHRGVNNSYIQRSEHPLAQLYCHSIMEHHHFDQCLMILNSPGNQILSGLSIEEYKTTLKIIKQAILATDLALYIKRLGEFSELIRKNQFNLEDPHQKELFLAMLMTACDLSAITKPWPIQQRIAELVATEFFDQGDRERKELNIEPTDLMNREKKNKIPSMQVGFIDAICLQLYEALTHVSEDCFPLLDGCRKNRQKWQALAEQQ

SEQ ID NO: 8737 - protein, 326 aa, Artificial Sequence
  source: /note="Description of Artificial Sequence: Synthetic Destabilizing Domain (DD)"
EETRELQSLAAAVVPSAQTLKITDFSFSDFELSDLETALCTIRMFTDLNLVQNFQMKHEVLCRWILSVKKNYRKNVAYHNWRHAFNTAQCMFAALKAGKIQNKLTDLEILALLIAALSHDLDHRGVNNSYIQRSEHPLAQLYCHSIMEHHHFDQCLMILNSPGNQILSGLSIEEYKTTLKIIKQAILATDLALYIKRDGEFTELIRKNQFNLEDPHQKELFLAMLMTACDLSAITKPWPIQQRIAELVATEFFDQGDRERKELNIEPTDLMNREKKNKIPSMQVGFIDAICLQLYEALTHVSEDCFPLLDGCRKNRQKWQALAEQQ

SEQ ID NO: 8738 - protein, 326 aa, Artificial Sequence
  source: /note="Description of Artificial Sequence: Synthetic Destabilizing Domain (DD)"
EETRELQSLAAAVVPSAQTLKITDFSFSDFELSDLETALCTIRMFTDLNLVQNFQMKHEVLCRWILSVKKNYRKNVAYHNWRHAFNTAQCMFAALKAGKIQNKLTDLEILALLIAALSHDLDHRGVNNSYIQRSEHPLAQLYCHSIMEHHHFDQCLMILNSPGNQILSGLSIEEYKTTLKIIKQAILATDLALYIKRLGEFVELIRKNQFNLEDPHQKELFLAMLMTACDLSAITKPWPIQQRIAELVATEFFDQGDRERKELNIEPTDLMNREKKNKIPSMQVGFIDAICLQLYEALTHVSEDCFPLLDGCRKNRQKWQALAEQQ

SEQ ID NO: 8739 - protein, 326 aa, Artificial Sequence
  source: /note="Description of Artificial Sequence: Synthetic Destabilizing Domain (DD)"
EETRELQSLAAAVVPSAQTLKITDFSFSDFELSDLETALCTIRMFTDLNLVQNFQMKHEVLCRWILSVKKNYRKNVAYHNWRHAFNTAQCMFAALKAGKIQNKLTDLEILALLIAALSHDLDHRGVNNSYIQRSEHPLAQLYCHSIMEHHHFDQCLMILNSPGNQILSGLSIEEYKTTLKIIKQAILATDLALYIKRGGEFVELIRKNQFNLEDPHQKELFLAMLMTACDLSAITKPWPIQQRIAELVATEFFDQGDRERKELNIEPTDLMNREKKNKIPSMQVGFIDAICLQLYEALTHVSEDCFPLLDGCRKNRQKWQALAEQQ

SEQ ID NO: 8740 - protein, 326 aa, Artificial Sequence
  source: /note="Description of Artificial Sequence: Synthetic Destabilizing Domain (DD)"
EETRELQSLAAAVVPSAQTLKITDFSFSDFELSDLETALCTIRMFTDLNLVQNFQMKHEVLCRWILSVKKNYRKNVAYHNWRHAFNTAQCMFAALKAGKIQNKLTDLEILALLIAALSHDLDHRGVNNSYIQRSEHPLAQLYCHSIMEHHHFDQCLMILNSPGNQILSGLSIEEYKTTLKIIKQAILATDLALYIKRWGEFAELIRKNQFNLEDPHQKELFLAMLMTACDLSAITKPWPIQQRIAELVATEFFDQGDRERKELNIEPTDLMNREKKNKIPSMQVGFIDAICLQLYEALTHVSEDCFPLLDGCRKNRQKWQALAEQQ

SEQ ID NO: 8741 - protein, 5 aa, Artificial Sequence
  source: /note="Description of Artificial Sequence: Synthetic Linker"
GSLDG

SEQ ID NO: 8742 - protein, 19 aa, Artificial Sequence
  source: /note="Description of Artificial Sequence: Synthetic Cleavage site"
ATNFSLLKQAGDVEENPGP

SEQ ID NO: 8743 - protein, 567 aa, Artificial Sequence
  source: /note="Description of Artificial Sequence: Synthetic Construct"
MVSKGAELFTGIVPILIELNGDVNGHKFSVSGEGEGDATYGKLTLKFICTTGKLPVPWPTLVTTLSYGVQCFSRYPDHMKQHDFFKSAMPEGYIQERTIFFEDDGNYKSRAEVKFEGDTLVNRIELTGTDFKEDGNILGNKMEYNYNAHNVYIMTDKAKNGIKVNFKIRHNIEDGSVQLADHYQQNTPIGDGPVLLPDNHYLSTQSALSKDPNEKRDHMIYFGFVTAAAITHGMDELYKGSEETRELQSLAAAVVPSAQTLKITDFSFSDFELSDLETALCTIRMFTDLNLVQNFQMKHEVLCRWILSVKKNYRKNVAYHNWRHAFNTAQCMFAALKAGKIQNKLTDLEILALLIAALSHDLDHRGVNNSYIQRSEHPLAQLYCHSIMEHHHFDQCLMILNSPGNQILSGLSIEEYKTTLKIIKQAILATDLALYIKRDGEFSELIRKNQFNLEDPHQKELFLAMLMTACDLSAITKPWPIQQRIAELVATEFFDQGDRERKELNIEPTDLMNREKKNKIPSMQVGFIDAICLQLYEALTHVSEDCFPLLDGCRKNRQKWQALAEQQ

SEQ ID NO: 8744 - protein, 567 aa, Artificial Sequence
  source: /note="Description of Artificial Sequence: Synthetic Construct"
MVSKGAELFTGIVPILIELNGDVNGHKFSVSGEGEGDATYGKLTLKFICTTGKLPVPWPTLVTTLSYGVQCFSRYPDHMKQHDFFKSAMPEGYIQERTIFFEDDGNYKSRAEVKFEGDTLVNRIELTGTDFKEDGNILGNKMEYNYNAHNVYIMTDKAKNGIKVNFKIRHNIEDGSVQLADHYQQNTPIGDGPVLLPDNHYLSTQSALSKDPNEKRDHMIYFGFVTAAAITHGMDELYKGSEETRELQSLAAAVVPSAQTLKITDFSFSDFELSDLETALCTIRMFTDLNLVQNFQMKHEVLCRWILSVKKNYRKNVAYHNWRHAFNTAQCMFAALKAGKIQNKLTDLEILALLIAALSHDLDHRGVNNSYIQRSEHPLAQLYCHSIMEHHHFDQCLMILNSPGNQILSGLSIEEYKTTLKIIKQAILATDLALYIKREGEFDELIRKNQFNLEDPHQKELFLAMLMTACDLSAITKPWPIQQRIAELVATEFFDQGDRERKELNIEPTDLMNREKKNKIPSMQVGFIDAICLQLYEALTHVSEDCFPLLDGCRKNRQKWQALAEQQ

SEQ ID NO: 8745 - protein, 826 aa, Artificial Sequence
  source: /note="Description of Artificial Sequence: Synthetic Construct"
MVSKGAELFTGIVPILIELNGDVNGHKFSVSGEGEGDATYGKLTLKFICTTGKLPVPWPTLVTTLSYGVQCFSRYPDHMKQHDFFKSAMPEGYIQERTIFFEDDGNYKSRAEVKFEGDTLVNRIELTGTDFKEDGNILGNKMEYNYNAHNVYIMTDKAKNGIKVNFKIRHNIEDGSVQLADHYQQNTPIGDGPVLLPDNHYLSTQSALSKDPNEKRDHMIYFGFVTAAAITHGMDELYKGSEETRELQSLAAAVVPSAQTLKITDFSFSDFELSDLETALCTIRMFTDLNLVQNFQMKHEVLCRWILSVKKNYRKNVAYHNWRHAFNTAQCMFAALKAGKIQNKLTDLEILALLIAALSHDLDHRGVNNSYIQRSEHPLAQLYCHSIMEHHHFDQCLMILNSPGNQILSGLSIEEYKTTLKIIKQAILATDLALYIKRVGEFGELIRKNQFNLEDPHQKELFLAMLMTACDLSAITKPWPIQQRIAELVATEFFDQGDRERKELNIEPTDLMNREKKNKIPSMQVGFIDAICLQLYEALTHVSEDCFPLLDGCRKNRQKWQALAEQQGSLDGATNFSLLKQAGDVEENPGPLSKGEEDNMAIIKEFMRFKVHMEGSVNGHEFEIEGEGEGRPYEGTQTAKLKVTKGGPLPFAWDILSPQFMYGSKAYVKHPADIPDYLKLSFPEGFKWERVMNFEDGGVVTVTQDSSLQDGEFIYKVKLRGTNFPSDGPVMQKKTMGWEASSERMYPEDGALKGEIKQRLKLKDGGHYDAEVKTTYKAKKPVQLPGAYNVNIKLDITSHNEDYTIVEQYERAEGRHSTGGMDELYK

SEQ ID NO: 8746 - protein, 826 aa, Artificial Sequence
  source: /note="Description of Artificial Sequence: Synthetic Construct"
MVSKGAELFTGIVPILIELNGDVNGHKFSVSGEGEGDATYGKLTLKFICTTGKLPVPWPTLVTTLSYGVQCFSRYPDHMKQHDFFKSAMPEGYIQERTIFFEDDGNYKSRAEVKFEGDTLVNRIELTGTDFKEDGNILGNKMEYNYNAHNVYIMTDKAKNGIKVNFKIRHNIEDGSVQLADHYQQNTPIGDGPVLLPDNHYLSTQSALSKDPNEKRDHMIYFGFVTAAAITHGMDELYKGSEETRELQSLAAAVVPSAQTLKITDFSFSDFELSDLETALCTIRMFTDLNLVQNFQMKHEVLCRWILSVKKNYRKNVAYHNWRHAFNTAQCMFAALKAGKIQNKLTDLEILALLIAALSHDLDHRGVNNSYIQRSEHPLAQLYCHSIMEHHHFDQCLMILNSPGNQILSGLSIEEYKTTLKIIKQAILATDLALYIKRWGEFGELIRKNQFNLEDPHQKELFLAMLMTACDLSAITKPWPIQQRIAELVATEFFDQGDRERKELNIEPTDLMNREKKNKIPSMQVGFIDAICLQLYEALTHVSEDCFPLLDGCRKNRQKWQALAEQQGSLDGATNFSLLKQAGDVEENPGPLSKGEEDNMAIIKEFMRFKVHMEGSVNGHEFEIEGEGEGRPYEGTQTAKLKVTKGGPLPFAWDILSPQFMYGSKAYVKHPADIPDYLKLSFPEGFKWERVMNFEDGGVVTVTQDSSLQDGEFIYKVKLRGTNFPSDGPVMQKKTMGWEASSERMYPEDGALKGEIKQRLKLKDGGHYDAEVKTTYKAKKPVQLPGAYNVNIKLDITSHNEDYTIVEQYERAEGRHSTGGMDELYK

SEQ ID NO: 8747 - protein, 826 aa, Artificial Sequence
  source: /note="Description of Artificial Sequence: Synthetic Construct"
MVSKGAELFTGIVPILIELNGDVNGHKFSVSGEGEGDATYGKLTLKFICTTGKLPVPWPTLVTTLSYGVQCFSRYPDHMKQHDFFKSAMPEGYIQERTIFFEDDGNYKSRAEVKFEGDTLVNRIELTGTDFKEDGNILGNKMEYNYNAHNVYIMTDKAKNGIKVNFKIRHNIEDGSVQLADHYQQNTPIGDGPVLLPDNHYLSTQSALSKDPNEKRDHMIYFGFVTAAAITHGMDELYKGSEETRELQSLAAAVVPSAQTLKITDFSFSDFELSDLETALCTIRMFTDLNLVQNFQMKHEVLCRWILSVKKNYRKNVAYHNWRHAFNTAQCMFAALKAGKIQNKLTDLEILALLIAALSHDLDHRGVNNSYIQRSEHPLAQLYCHSIMEHHHFDQCLMILNSPGNQILSGLSIEEYKTTLKIIKQAILATDLALYIKRWGEFVELIRKNQFNLEDPHQKELFLAMLMTACDLSAITKPWPIQQRIAELVATEFFDQGDRERKELNIEPTDLMNREKKNKIPSMQVGFIDAICLQLYEALTHVSEDCFPLLDGCRKNRQKWQALAEQQGSLDGATNFSLLKQAGDVEENPGPLSKGEEDNMAIIKEFMRFKVHMEGSVNGHEFEIEGEGEGRPYEGTQTAKLKVTKGGPLPFAWDILSPQFMYGSKAYVKHPADIPDYLKLSFPEGFKWERVMNFEDGGVVTVTQDSSLQDGEFIYKVKLRGTNFPSDGPVMQKKTMGWEASSERMYPEDGALKGEIKQRLKLKDGGHYDAEVKTTYKAKKPVQLPGAYNVNIKLDITSHNEDYTIVEQYERAEGRHSTGGMDELYK

SEQ ID NO: 8748 - protein, 826 aa, Artificial Sequence
  source: /note="Description of Artificial Sequence: Synthetic Construct"
MVSKGAELFTGIVPILIELNGDVNGHKFSVSGEGEGDATYGKLTLKFICTTGKLPVPWPTLVTTLSYGVQCFSRYPDHMKQHDFFKSAMPEGYIQERTIFFEDDGNYKSRAEVKFEGDTLVNRIELTGTDFKEDGNILGNKMEYNYNAHNVYIMTDKAKNGIKVNFKIRHNIEDGSVQLADHYQQNTPIGDGPVLLPDNHYLSTQSALSKDPNEKRDHMIYFGFVTAAAITHGMDELYKGSEETRELQSLAAAVVPSAQTLKITDFSFSDFELSDLETALCTIRMFTDLNLVQNFQMKHEVLCRWILSVKKNYRKNVAYHNWRHAFNTAQCMFAALKAGKIQNKLTDLEILALLIAALSHDLDHRGVNNSYIQRSEHPLAQLYCHSIMEHHHFDQCLMILNSPGNQILSGLSIEEYKTTLKIIKQAILATDLALYIKRLGEFWELIRKNQFNLEDPHQKELFLAMLMTACDLSAITKPWPIQQRIAELVATEFFDQGDRERKELNIEPTDLMNREKKNKIPSMQVGFIDAICLQLYEALTHVSEDCFPLLDGCRKNRQKWQALAEQQGSLDGATNFSLLKQAGDVEENPGPLSKGEEDNMAIIKEFMRFKVHMEGSVNGHEFEIEGEGEGRPYEGTQTAKLKVTKGGPLPFAWDILSPQFMYGSKAYVKHPADIPDYLKLSFPEGFKWERVMNFEDGGVVTVTQDSSLQDGEFIYKVKLRGTNFPSDGPVMQKKTMGWEASSERMYPEDGALKGEIKQRLKLKDGGHYDAEVKTTYKAKKPVQLPGAYNVNIKLDITSHNEDYTIVEQYERAEGRHSTGGMDELYK

SEQ ID NO: 8749 - protein, 826 aa, Artificial Sequence
  source: /note="Description of Artificial Sequence: Synthetic Construct"
MVSKGAELFTGIVPILIELNGDVNGHKFSVSGEGEGDATYGKLTLKFICTTGKLPVPWPTLVTTLSYGVQCFSRYPDHMKQHDFFKSAMPEGYIQERTIFFEDDGNYKSRAEVKFEGDTLVNRIELTGTDFKEDGNILGNKMEYNYNAHNVYIMTDKAKNGIKVNFKIRHNIEDGSVQLADHYQQNTPIGDGPVLLPDNHYLSTQSALSKDPNEKRDHMIYFGFVTAAAITHGMDELYKGSEETRELQSLAAAVVPSAQTLKITDFSFSDFELSDLETALCTIRMFTDLNLVQNFQMKHEVLCRWILSVKKNYRKNVAYHNWRHAFNTAQCMFAALKAGKIQNKLTDLEILALLIAALSHDLDHRGVNNSYIQRSEHPLAQLYCHSIMEHHHFDQCLMILNSPGNQILSGLSIEEYKTTLKIIKQAILATDLALYIKRPGEFQELIRKNQFNLEDPHQKELFLAMLMTACDLSAITKPWPIQQRIAELVATEFFDQGDRERKELNIEPTDLMNREKKNKIPSMQVGFIDAICLQLYEALTHVSEDCFPLLDGCRKNRQKWQALAEQQGSLDGATNFSLLKQAGDVEENPGPLSKGEEDNMAIIKEFMRFKVHMEGSVNGHEFEIEGEGEGRPYEGTQTAKLKVTKGGPLPFAWDILSPQFMYGSKAYVKHPADIPDYLKLSFPEGFKWERVMNFEDGGVVTVTQDSSLQDGEFIYKVKLRGTNFPSDGPVMQKKTMGWEASSERMYPEDGALKGEIKQRLKLKDGGHYDAEVKTTYKAKKPVQLPGAYNVNIKLDITSHNEDYTIVEQYERAEGRHSTGGMDELYK

SEQ ID NO: 8750 - protein, 567 aa, Artificial Sequence
  source: /note="Description of Artificial Sequence: Synthetic Construct"
MVSKGAELFTGIVPILIELNGDVNGHKFSVSGEGEGDATYGKLTLKFICTTGKLPVPWPTLVTTLSYGVQCFSRYPDHMKQHDFFKSAMPEGYIQERTIFFEDDGNYKSRAEVKFEGDTLVNRIELTGTDFKEDGNILGNKMEYNYNAHNVYIMTDKAKNGIKVNFKIRHNIEDGSVQLADHYQQNTPIGDGPVLLPDNHYLSTQSALSKDPNEKRDHMIYFGFVTAAAITHGMDELYKGSEETRELQSLAAAVVPSAQTLKITDFSFSDFELSDLETALCTIRMFTDLNLVQNFQMKHEVLCRWILSVKKNYRKNVAYHNWRHAFNTAQCMFAALKAGKIQNKLTDLEILALLIAALSHDLDHRGVNNSYIQRSEHPLAQLYCHSIMEHHHFDQCLMILNSPGNQILSGLSIEEYKTTLKIIKQAILATDLALYIKRAGEFAELIRKNQFNLEDPHQKELFLAMLMTACDLSAITKPWPIQQRIAELVATEFFDQGDRERKELNIEPTDLMNREKKNKIPSMQVGFIDAICLQLYEALTHVSEDCFPLLDGCRKNRQKWQALAEQQ

SEQ ID NO: 8751 - protein, 826 aa, Artificial Sequence
  source: /note="Description of Artificial Sequence: Synthetic Construct"
MVSKGAELFTGIVPILIELNGDVNGHKFSVSGEGEGDATYGKLTLKFICTTGKLPVPWPTLVTTLSYGVQCFSRYPDHMKQHDFFKSAMPEGYIQERTIFFEDDGNYKSRAEVKFEGDTLVNRIELTGTDFKEDGNILGNKMEYNYNAHNVYIMTDKAKNGIKVNFKIRHNIEDGSVQLADHYQQNTPIGDGPVLLPDNHYLSTQSALSKDPNEKRDHMIYFGFVTAAAITHGMDELYKGSEETRELQSLAAAVVPSAQTLKITDFSFSDFELSDLETALCTIRMFTDLNLVQNFQMKHEVLCRWILSVKKNYRKNVAYHNWRHAFNTAQCMFAALKAGKIQNKLTDLEILALLIAALSHDLDHRGVNNSYIQRSEHPLAQLYCHSIMEHHHFDQCLMILNSPGNQILSGLSIEEYKTTLKIIKQAILATDLALYIKRSGEFGELIRKNQFNLEDPHQKELFLAMLMTACDLSAITKPWPIQQRIAELVATEFFDQGDRERKELNIEPTDLMNREKKNKIPSMQVGFIDAICLQLYEALTHVSEDCFPLLDGCRKNRQKWQALAEQQGSLDGATNFSLLKQAGDVEENPGPLSKGEEDNMAIIKEFMRFKVHMEGSVNGHEFEIEGEGEGRPYEGTQTAKLKVTKGGPLPFAWDILSPQFMYGSKAYVKHPADIPDYLKLSFPEGFKWERVMNFEDGGVVTVTQDSSLQDGEFIYKVKLRGTNFPSDGPVMQKKTMGWEASSERMYPEDGALKGEIKQRLKLKDGGHYDAEVKTTYKAKKPVQLPGAYNVNIKLDITSHNEDYTIVEQYERAEGRHSTGGMDELYK

SEQ ID NO: 8752 - protein, 826 aa, Artificial Sequence
  source: /note="Description of Artificial Sequence: Synthetic Construct"
MVSKGAELFTGIVPILIELNGDVNGHKFSVSGEGEGDATYGKLTLKFICTTGKLPVPWPTLVTTLSYGVQCFSRYPDHMKQHDFFKSAMPEGYIQERTIFFEDDGNYKSRAEVKFEGDTLVNRIELTGTDFKEDGNILGNKMEYNYNAHNVYIMTDKAKNGIKVNFKIRHNIEDGSVQLADHYQQNTPIGDGPVLLPDNHYLSTQSALSKDPNEKRDHMIYFGFVTAAAITHGMDELYKGSEETRELQSLAAAVVPSAQTLKITDFSFSDFELSDLETALCTIRMFTDLNLVQNFQMKHEVLCRWILSVKKNYRKNVAYHNWRHAFNTAQCMFAALKAGKIQNKLTDLEILALLIAALSHDLDHRGVNNSYIQRSEHPLAQLYCHSIMEHHHFDQCLMILNSPGNQILSGLSIEEYKTTLKIIKQAILATDLALYIKRTGEFPELIRKNQFNLEDPHQKELFLAMLMTACDLSAITKPWPIQQRIAELVATEFFDQGDRERKELNIEPTDLMNREKKNKIPSMQVGFIDAICLQLYEALTHVSEDCFPLLDGCRKNRQKWQALAEQQGSLDGATNFSLLKQAGDVEENPGPLSKGEEDNMAIIKEFMRFKVHMEGSVNGHEFEIEGEGEGRPYEGTQTAKLKVTKGGPLPFAWDILSPQFMYGSKAYVKHPADIPDYLKLSFPEGFKWERVMNFEDGGVVTVTQDSSLQDGEFIYKVKLRGTNFPSDGPVMQKKTMGWEASSERMYPEDGALKGEIKQRLKLKDGGHYDAEVKTTYKAKKPVQLPGAYNVNIKLDITSHNEDYTIVEQYERAEGRHSTGGMDELYK

SEQ ID NO: 8753 - protein, 826 aa, Artificial Sequence
  source: /note="Description of Artificial Sequence: Synthetic Construct"
MVSKGAELFTGIVPILIELNGDVNGHKFSVSGEGEGDATYGKLTLKFICTTGKLPVPWPTLVTTLSYGVQCFSRYPDHMKQHDFFKSAMPEGYIQERTIFFEDDGNYKSRAEVKFEGDTLVNRIELTGTDFKEDGNILGNKMEYNYNAHNVYIMTDKAKNGIKVNFKIRHNIEDGSVQLADHYQQNTPIGDGPVLLPDNHYLSTQSALSKDPNEKRDHMIYFGFVTAAAITHGMDELYKGSEETRELQSLAAAVVPSAQTLKITDFSFSDFELSDLETALCTIRMFTDLNLVQNFQMKHEVLCRWILSVKKNYRKNVAYHNWRHAFNTAQCMFAALKAGKIQNKLTDLEILALLIAALSHDLDHRGVNNSYIQRSEHPLAQLYCHSIMEHHHFDQCLMILNSPGNQILSGLSIEEYKTTLKIIKQAILATDLALYIKRMGEFHELIRKNQFNLEDPHQKELFLAMLMTACDLSAITKPWPIQQRIAELVATEFFDQGDRERKELNIEPTDLMNREKKNKIPSMQVGFIDAICLQLYEALTHVSEDCFPLLDGCRKNRQKWQALAEQQGSLDGATNFSLLKQAGDVEENPGPLSKGEEDNMAIIKEFMRFKVHMEGSVNGHEFEIEGEGEGRPYEGTQTAKLKVTKGGPLPFAWDILSPQFMYGSKAYVKHPADIPDYLKLSFPEGFKWERVMNFEDGGVVTVTQDSSLQDGEFIYKVKLRGTNFPSDGPVMQKKTMGWEASSERMYPEDGALKGEIKQRLKLKDGGHYDAEVKTTYKAKKPVQLPGAYNVNIKLDITSHNEDYTIVEQYERAEGRHSTGGMDELYK

SEQ ID NO: 8754 - protein, 826 aa, Artificial Sequence
  source: /note="Description of Artificial Sequence: Synthetic Construct"
MVSKGAELFTGIVPILIELNGDVNGHKFSVSGEGEGDATYGKLTLKFICTTGKLPVPWPTLVTTLSYGVQCFSRYPDHMKQHDFFKSAMPEGYIQERTIFFEDDGNYKSRAEVKFEGDTLVNRIELTGTDFKEDGNILGNKMEYNYNAHNVYIMTDKAKNGIKVNFKIRHNIEDGSVQLADHYQQNTPIGDGPVLLPDNHYLSTQSALSKDPNEKRDHMIYFGFVTAAAITHGMDELYKGSEETRELQSLAAAVVPSAQTLKITDFSFSDFELSDLETALCTIRMFTDLNLVQNFQMKHEVLCRWILSVKKNYRKNVAYHNWRHAFNTAQCMFAALKAGKIQNKLTDLEILALLIAALSHDLDHRGVNNSYIQRSEHPLAQLYCHSIMEHHHFDQCLMILNSPGNQILSGLSIEEYKTTLKIIKQAILATDLALYIKRYGEFMELIRKNQFNLEDPHQKELFLAMLMTACDLSAITKPWPIQQRIAELVATEFFDQGDRERKELNIEPTDLMNREKKNKIPSMQVGFIDAICLQLYEALTHVSEDCFPLLDGCRKNRQKWQALAEQQGSLDGATNFSLLKQAGDVEENPGPLSKGEEDNMAIIKEFMRFKVHMEGSVNGHEFEIEGEGEGRPYEGTQTAKLKVTKGGPLPFAWDILSPQFMYGSKAYVKHPADIPDYLKLSFPEGFKWERVMNFEDGGVVTVTQDSSLQDGEFIYKVKLRGTNFPSDGPVMQKKTMGWEASSERMYPEDGALKGEIKQRLKLKDGGHYDAEVKTTYKAKKPVQLPGAYNVNIKLDITSHNEDYTIVEQYERAEGRHSTGGMDELYK

SEQ ID NO: 8755 - protein, 826 aa, Artificial Sequence
  source: /note="Description of Artificial Sequence: Synthetic Construct"
MVSKGAELFTGIVPILIELNGDVNGHKFSVSGEGEGDATYGKLTLKFICTTGKLPVPWPTLVTTLSYGVQCFSRYPDHMKQHDFFKSAMPEGYIQERTIFFEDDGNYKSRAEVKFEGDTLVNRIELTGTDFKEDGNILGNKMEYNYNAHNVYIMTDKAKNGIKVNFKIRHNIEDGSVQLADHYQQNTPIGDGPVLLPDNHYLSTQSALSKDPNEKRDHMIYFGFVTAAAITHGMDELYKGSEETRELQSLAAAVVPSAQTLKITDFSFSDFELSDLETALCTIRMFTDLNLVQNFQMKHEVLCRWILSVKKNYRKNVAYHNWRHAFNTAQCMFAALKAGKIQNKLTDLEILALLIAALSHDLDHRGVNNSYIQRSEHPLAQLYCHSIMEHHHFDQCLMILNSPGNQILSGLSIEEYKTTLKIIKQAILATDLALYIKRPGEFDELIRKNQFNLEDPHQKELFLAMLMTACDLSAITKPWPIQQRIAELVATEFFDQGDRERKELNIEPTDLMNREKKNKIPSMQVGFIDAICLQLYEALTHVSEDCFPLLDGCRKNRQKWQALAEQQGSLDGATNFSLLKQAGDVEENPGPLSKGEEDNMAIIKEFMRFKVHMEGSVNGHEFEIEGEGEGRPYEGTQTAKLKVTKGGPLPFAWDILSPQFMYGSKAYVKHPADIPDYLKLSFPEGFKWERVMNFEDGGVVTVTQDSSLQDGEFIYKVKLRGTNFPSDGPVMQKKTMGWEASSERMYPEDGALKGEIKQRLKLKDGGHYDAEVKTTYKAKKPVQLPGAYNVNIKLDITSHNEDYTIVEQYERAEGRHSTGGMDELYK

SEQ ID NO: 8756 - protein, 567 aa, Artificial Sequence
  source: /note="Description of Artificial Sequence: Synthetic Construct"
MVSKGAELFTGIVPILIELNGDVNGHKFSVSGEGEGDATYGKLTLKFICTTGKLPVPWPTLVTTLSYGVQCFSRYPDHMKQHDFFKSAMPEGYIQERTIFFEDDGNYKSRAEVKFEGDTLVNRIELTGTDFKEDGNILGNKMEYNYNAHNVYIMTDKAKNGIKVNFKIRHNIEDGSVQLADHYQQNTPIGDGPVLLPDNHYLSTQSALSKDPNEKRDHMIYFGFVTAAAITHGMDELYKGSEETRELQSLAAAVVPSAQTLKITDFSFSDFELSDLETALCTIRMFTDLNLVQNFQMKHEVLCRWILSVKKNYRKNVAYHNWRHAFNTAQCMFAALKAGKIQNKLTDLEILALLIAALSHDLDHRGVNNSYIQRSEHPLAQLYCHSIMEHHHFDQCLMILNSPGNQILSGLSIEEYKTTLKIIKQAILATDLALYIKRPGEFGELIRKNQFNLEDPHQKELFLAMLMTACDLSAITKPWPIQQRIAELVATEFFDQGDRERKELNIEPTDLMNREKKNKIPSMQVGFIDAICLQLYEALTHVSEDCFPLLDGCRKNRQKWQALAEQQ

SEQ ID NO: 8757 - protein, 826 aa, Artificial Sequence
  source: /note="Description of Artificial Sequence: Synthetic Construct"
MVSKGAELFTGIVPILIELNGDVNGHKFSVSGEGEGDATYGKLTLKFICTTGKLPVPWPTLVTTLSYGVQCFSRYPDHMKQHDFFKSAMPEGYIQERTIFFEDDGNYKSRAEVKFEGDTLVNRIELTGTDFKEDGNILGNKMEYNYNAHNVYIMTDKAKNGIKVNFKIRHNIEDGSVQLADHYQQNTPIGDGPVLLPDNHYLSTQSALSKDPNEKRDHMIYFGFVTAAAITHGMDELYKGSEETRELQSLAAAVVPSAQTLKITDFSFSDFELSDLETALCTIRMFTDLNLVQNFQMKHEVLCRWILSVKKNYRKNVAYHNWRHAFNTAQCMFAALKAGKIQNKLTDLEILALLIAALSHDLDHRGVNNSYIQRSEHPLAQLYCHSIMEHHHFDQCLMILNSPGNQILSGLSIEEYKTTLKIIKQAILATDLALYIKRWGEFLELIRKNQFNLEDPHQKELFLAMLMTACDLSAITKPWPIQQRIAELVATEFFDQGDRERKELNIEPTDLMNREKKNKIPSMQVGFIDAICLQLYEALTHVSEDCFPLLDGCRKNRQKWQALAEQQGSLDGATNFSLLKQAGDVEENPGPLSKGEEDNMAIIKEFMRFKVHMEGSVNGHEFEIEGEGEGRPYEGTQTAKLKVTKGGPLPFAWDILSPQFMYGSKAYVKHPADIPDYLKLSFPEGFKWERVMNFEDGGVVTVTQDSSLQDGEFIYKVKLRGTNFPSDGPVMQKKTMGWEASSERMYPEDGALKGEIKQRLKLKDGGHYDAEVKTTYKAKKPVQLPGAYNVNIKLDITSHNEDYTIVEQYERAEGRHSTGGMDELYK

SEQ ID NO: 8758 - protein, 567 aa, Artificial Sequence
  source: /note="Description of Artificial Sequence: Synthetic Construct"
MVSKGAELFTGIVPILIELNGDVNGHKFSVSGEGEGDATYGKLTLKFICTTGKLPVPWPTLVTTLSYGVQCFSRYPDHMKQHDFFKSAMPEGYIQERTIFFEDDGNYKSRAEVKFEGDTLVNRIELTGTDFKEDGNILGNKMEYNYNAHNVYIMTDKAKNGIKVNFKIRHNIEDGSVQLADHYQQNTPIGDGPVLLPDNHYLSTQSALSKDPNEKRDHMIYFGFVTAAAITHGMDELYKGSEETRELQSLAAAVVPSAQTLKITDFSFSDFELSDLETALCTIRMFTDLNLVQNFQMKHEVLCRWILSVKKNYRKNVAYHNWRHAFNTAQCMFAALKAGKIQNKLTDLEILALLIAALSHDLDHRGVNNSYIQRSEHPLAQLYCHSIMEHHHFDQCLMILNSPGNQILSGLSIEEYKTTLKIIKQAILATDLALYIKRLGEFSELIRKNQFNLEDPHQKELFLAMLMTACDLSAITKPWPIQQRIAELVATEFFDQGDRERKELNIEPTDLMNREKKNKIPSMQVGFIDAICLQLYEALTHVSEDCFPLLDGCRKNRQKWQALAEQQ

SEQ ID NO: 8759 - protein, 826 aa, Artificial Sequence
  source: /note="Description of Artificial Sequence: Synthetic Construct"
MVSKGAELFTGIVPILIELNGDVNGHKFSVSGEGEGDATYGKLTLKFICTTGKLPVPWPTLVTTLSYGVQCFSRYPDHMKQHDFFKSAMPEGYIQERTIFFEDDGNYKSRAEVKFEGDTLVNRIELTGTDFKEDGNILGNKMEYNYNAHNVYIMTDKAKNGIKVNFKIRHNIEDGSVQLADHYQQNTPIGDGPVLLPDNHYLSTQSALSKDPNEKRDHMIYFGFVTAAAITHGMDELYKGSEETRELQSLAAAVVPSAQTLKITDFSFSDFELSDLETALCTIRMFTDLNLVQNFQMKHEVLCRWILSVKKNYRKNVAYHNWRHAFNTAQCMFAALKAGKIQNKLTDLEILALLIAALSHDLDHRGVNNSYIQRSEHPLAQLYCHSIMEHHHFDQCLMILNSPGNQILSGLSIEEYKTTLKIIKQAILATDLALYIKRDGEFTELIRKNQFNLEDPHQKELFLAMLMTACDLSAITKPWPIQQRIAELVATEFFDQGDRERKELNIEPTDLMNREKKNKIPSMQVGFIDAICLQLYEALTHVSEDCFPLLDGCRKNRQKWQALAEQQGSLDGATNFSLLKQAGDVEENPGPLSKGEEDNMAIIKEFMRFKVHMEGSVNGHEFEIEGEGEGRPYEGTQTAKLKVTKGGPLPFAWDILSPQFMYGSKAYVKHPADIPDYLKLSFPEGFKWERVMNFEDGGVVTVTQDSSLQDGEFIYKVKLRGTNFPSDGPVMQKKTMGWEASSERMYPEDGALKGEIKQRLKLKDGGHYDAEVKTTYKAKKPVQLPGAYNVNIKLDITSHNEDYTIVEQYERAEGRHSTGGMDELYK

SEQ ID NO: 8760 - protein, 567 aa, Artificial Sequence
  source: /note="Description of Artificial Sequence: Synthetic Construct"
MVSKGAELFTGIVPILIELNGDVNGHKFSVSGEGEGDATYGKLTLKFICTTGKLPVPWPTLVTTLSYGVQCFSRYPDHMKQHDFFKSAMPEGYIQERTIFFEDDGNYKSRAEVKFEGDTLVNRIELTGTDFKEDGNILGNKMEYNYNAHNVYIMTDKAKNGIKVNFKIRHNIEDGSVQLADHYQQNTPIGDGPVLLPDNHYLSTQSALSKDPNEKRDHMIYFGFVTAAAITHGMDELYKGSEETRELQSLAAAVVPSAQTLKITDFSFSDFELSDLETALCTIRMFTDLNLVQNFQMKHEVLCRWILSVKKNYRKNVAYHNWRHAFNTAQCMFAALKAGKIQNKLTDLEILALLIAALSHDLDHRGVNNSYIQRSEHPLAQLYCHSIMEHHHFDQCLMILNSPGNQILSGLSIEEYKTTLKIIKQAILATDLALYIKRLGEFVELIRKNQFNLEDPHQKELFLAMLMTACDLSAITKPWPIQQRIAELVATEFFDQGDRERKELNIEPTDLMNREKKNKIPSMQVGFIDAICLQLYEALTHVSEDCFPLLDGCRKNRQKWQALAEQQ

SEQ ID NO: 8761 - protein, 826 aa, Artificial Sequence
  source: /note="Description of Artificial Sequence: Synthetic Construct"
MVSKGAELFTGIVPILIELNGDVNGHKFSVSGEGEGDATYGKLTLKFICTTGKLPVPWPTLVTTLSYGVQCFSRYPDHMKQHDFFKSAMPEGYIQERTIFFEDDGNYKSRAEVKFEGDTLVNRIELTGTDFKEDGNILGNKMEYNYNAHNVYIMTDKAKNGIKVNFKIRHNIEDGSVQLADHYQQNTPIGDGPVLLPDNHYLSTQSALSKDPNEKRDHMIYFGFVTAAAITHGMDELYKGSEETRELQSLAAAVVPSAQTLKITDFSFSDFELSDLETALCTIRMFTDLNLVQNFQMKHEVLCRWILSVKKNYRKNVAYHNWRHAFNTAQCMFAALKAGKIQNKLTDLEILALLIAALSHDLDHRGVNNSYIQRSEHPLAQLYCHSIMEHHHFDQCLMILNSPGNQILSGLSIEEYKTTLKIIKQAILATDLALYIKRGGEFVELIRKNQFNLEDPHQKELFLAMLMTACDLSAITKPWPIQQRIAELVATEFFDQGDRERKELNIEPTDLMNREKKNKIPSMQVGFIDAICLQLYEALTHVSEDCFPLLDGCRKNRQKWQALAEQQGSLDGATNFSLLKQAGDVEENPGPLSKGEEDNMAIIKEFMRFKVHMEGSVNGHEFEIEGEGEGRPYEGTQTAKLKVTKGGPLPFAWDILSPQFMYGSKAYVKHPADIPDYLKLSFPEGFKWERVMNFEDGGVVTVTQDSSLQDGEFIYKVKLRGTNFPSDGPVMQKKTMGWEASSERMYPEDGALKGEIKQRLKLKDGGHYDAEVKTTYKAKKPVQLPGAYNVNIKLDITSHNEDYTIVEQYERAEGRHSTGGMDELYK

SEQ ID NO: 8762 - protein, 826 aa, Artificial Sequence
  source: /note="Description of Artificial Sequence: Synthetic Construct"
MVSKGAELFTGIVPILIELNGDVNGHKFSVSGEGEGDATYGKLTLKFICTTGKLPVPWPTLVTTLSYGVQCFSRYPDHMKQHDFFKSAMPEGYIQERTIFFEDDGNYKSRAEVKFEGDTLVNRIELTGTDFKEDGNILGNKMEYNYNAHNVYIMTDKAKNGIKVNFKIRHNIEDGSVQLADHYQQNTPIGDGPVLLPDNHYLSTQSALSKDPNEKRDHMIYFGFVTAAAITHGMDELYKGSEETRELQSLAAAVVPSAQTLKITDFSFSDFELSDLETALCTIRMFTDLNLVQNFQMKHEVLCRWILSVKKNYRKNVAYHNWRHAFNTAQCMFAALKAGKIQNKLTDLEILALLIAALSHDLDHRGVNNSYIQRSEHPLAQLYCHSIMEHHHFDQCLMILNSPGNQILSGLSIEEYKTTLKIIKQAILATDLALYIKRWGEFAELIRKNQFNLEDPHQKELFLAMLMTACDLSAITKPWPIQQRIAELVATEFFDQGDRERKELNIEPTDLMNREKKNKIPSMQVGFIDAICLQLYEALTHVSEDCFPLLDGCRKNRQKWQALAEQQGSLDGATNFSLLKQAGDVEENPGPLSKGEEDNMAIIKEFMRFKVHMEGSVNGHEFEIEGEGEGRPYEGTQTAKLKVTKGGPLPFAWDILSPQFMYGSKAYVKHPADIPDYLKLSFPEGFKWERVMNFEDGGVVTVTQDSSLQDGEFIYKVKLRGTNFPSDGPVMQKKTMGWEASSERMYPEDGALKGEIKQRLKLKDGGHYDAEVKTTYKAKKPVQLPGAYNVNIKLDITSHNEDYTIVEQYERAEGRHSTGGMDELYK

SEQ ID NO: 8763 - DNA, 978 bp, Artificial Sequence
  source: /note="Description of Artificial Sequence: Synthetic Destabilizing Domain (DD)"
gaagaaacaagagagctacagtcgttagcggctgctgtggtgccatctgcccagacccttaaaattactgactttagcttcagtgactttgagctgtctgatctggaaacagcactgtgtacaattcggatgtttactgacctcaaccttgtgcagaacttccagatgaaacatgaggttctttgcagatggattttaagtgttaagaagaattatcggaagaatgttgcctatcataattggagacatgcctttaatacagctcagtgcatgtttgctgctctaaaagcaggcaaaattcagaacaagctgactgacctggagatacttgcattgctgattgctgcactaagccacgatttggatcaccgtggtgtgaataactcttacatacagcgaagtgaacatccacttgcccagctttactgccattcaatcatggaacaccatcattttgaccagtgcctgatgattcttaatagtccaggcaatcagattctcagtggcctctccattgaagaatataagaccacgttgaaaataatcaagcaagctattttagctacagacctagcactgtacattaagagggatggagaatttagtgaacttataagaaaaaatcaattcaatttggaagatcctcatcaaaaggagttgtttttggcaatgctgatgacagcttgtgatctttctgcaattacaaaaccctggcctattcaacaacggatagcagaacttgtagcaactgaattttttgatcaaggagacagagagagaaaagaactcaacatagaacccactgatctaatgaacagggagaagaaaaacaaaatcccaagtatgcaagttgggttcatagatgccatctgcttgcaactgtatgaggccctgacccacgtgtcagaggactgtttccctttgctagatggctgcagaaagaacaggcagaaatggcaggcccttgcagaacagcag

SEQ ID NO: 8764 - DNA, 978 bp, Artificial Sequence
  source: /note="Description of Artificial Sequence: Synthetic Destabilizing Domain (DD)"
gaagaaacaagagagctacagtcgttagcggctgctgtggtgccatctgcccagacccttaaaattactgactttagcttcagtgactttgagctgtctgatctggaaacagcactgtgtacaattcggatgtttactgacctcaaccttgtgcagaacttccagatgaaacatgaggttctttgcagatggattttaagtgttaagaagaattatcggaagaatgttgcctatcataattggagacatgcctttaatacagctcagtgcatgtttgctgctctaaaagcaggcaaaattcagaacaagctgactgacctggagatacttgcattgctgattgctgcactaagccacgatttggatcaccgtggtgtgaataactcttacatacagcgaagtgaacatccacttgcccagctttactgccattcaatcatggaacaccatcattttgaccagtgcctgatgattcttaatagtccaggcaatcagattctcagtggcctctccattgaagaatataagaccacgttgaaaataatcaagcaagctattttagctacagacctagcactgtacattaagagggagggagaatttgatgaacttataagaaaaaatcaattcaatttggaagatcctcatcaaaaggagttgtttttggcaatgctgatgacagcttgtgatctttctgcaattacaaaaccctggcctattcaacaacggatagcagaacttgtagcaactgaattttttgatcaaggagacagagagagaaaagaactcaacatagaacccactgatctaatgaacagggagaagaaaaacaaaatcccaagtatgcaagttgggttcatagatgccatctgcttgcaactgtatgaggccctgacccacgtgtcagaggactgtttccctttgctagatggctgcagaaagaacaggcagaaatggcaggcccttgcagaacagcag

SEQ ID NO: 8765 - DNA, 978 bp, Artificial Sequence
  source: /note="Description of Artificial Sequence: Synthetic Destabilizing Domain (DD)"
gaagaaacaagagagctacagtcgttagcggctgctgtggtgccatctgcccagacccttaaaattactgactttagcttcagtgactttgagctgtctgatctggaaacagcactgtgtacaattcggatgtttactgacctcaaccttgtgcagaacttccagatgaaacatgaggttctttgcagatggattttaagtgttaagaagaattatcggaagaatgttgcctatcataattggagacatgcctttaatacagctcagtgcatgtttgctgctctaaaagcaggcaaaattcagaacaagctgactgacctggagatacttgcattgctgattgctgcactaagccacgatttggatcaccgtggtgtgaataactcttacatacagcgaagtgaacatccacttgcccagctttactgccattcaatcatggaacaccatcattttgaccagtgcctgatgattcttaatagtccaggcaatcagattctcagtggcctctccattgaagaatataagaccacgttgaaaataatcaagcaagctattttagctacagacctagcactgtacattaagagggttggagaatttggtgaacttataagaaaaaatcaattcaatttggaagatcctcatcaaaaggagttgtttttggcaatgctgatgacagcttgtgatctttctgcaattacaaaaccctggcctattcaacaacggatagcagaacttgtagcaactgaattttttgatcaaggagacagagagagaaaagaactcaacatagaacccactgatctaatgaacagggagaagaaaaacaaaatcccaagtatgcaagttgggttcatagatgccatctgcttgcaactgtatgaggccctgacccacgtgtcagaggactgtttccctttgctagatggctgcagaaagaacaggcagaaatggcaggcccttgcagaacagcag

SEQ ID NO: 8766 - DNA, 978 bp, Artificial Sequence
  source: /note="Description of Artificial Sequence: Synthetic Destabilizing Domain (DD)"
gaagaaacaagagagctacagtcgttagcggctgctgtggtgccatctgcccagacccttaaaattactgactttagcttcagtgactttgagctgtctgatctggaaacagcactgtgtacaattcggatgtttactgacctcaaccttgtgcagaacttccagatgaaacatgaggttctttgcagatggattttaagtgttaagaagaattatcggaagaatgttgcctatcataattggagacatgcctttaatacagctcagtgcatgtttgctgctctaaaagcaggcaaaattcagaacaagctgactgacctggagatacttgcattgctgattgctgcactaagccacgatttggatcaccgtggtgtgaataactcttacatacagcgaagtgaacatccacttgcccagctttactgccattcaatcatggaacaccatcattttgaccagtgcctgatgattcttaatagtccaggcaatcagattctcagtggcctctccattgaagaatataagaccacgttgaaaataatcaagcaagctattttagctacagacctagcactgtacattaagaggtggggagaatttggggaacttataagaaaaaatcaattcaatttggaagatcctcatcaaaaggagttgtttttggcaatgctgatgacagcttgtgatctttctgcaattacaaaaccctggcctattcaacaacggatagcagaacttgtagcaactgaattttttgatcaaggagacagagagagaaaagaactcaacatagaacccactgatctaatgaacagggagaagaaaaacaaaatcccaagtatgcaagttgggttcatagatgccatctgcttgcaactgtatgaggccctgacccacgtgtcagaggactgtttccctttgctagatggctgcagaaagaacaggcagaaatggcaggcccttgcagaacagcag

SEQ ID NO: 8767 - DNA, 978 bp, Artificial Sequence
  source: /note="Description of Artificial Sequence: Synthetic Destabilizing Domain (DD)"
gaagaaacaagagagctacagtcgttagcggctgctgtggtgccatctgcccagacccttaaaattactgactttagcttcagtgactttgagctgtctgatctggaaacagcactgtgtacaattcggatgtttactgacctcaaccttgtgcagaacttccagatgaaacatgaggttctttgcagatggattttaagtgttaagaagaattatcggaagaatgttgcctatcataattggagacatgcctttaatacagctcagtgcatgtttgctgctctaaaagcaggcaaaattcagaacaagctgactgacctggagatacttgcattgctgattgctgcactaagccacgatttggatcaccgtggtgtgaataactcttacatacagcgaagtgaacatccacttgcccagctttactgccattcaatcatggaacaccatcattttgaccagtgcctgatgattcttaatagtccaggcaatcagattctcagtggcctctccattgaagaatataagaccacgttgaaaataatcaagcaagctattttagctacagacctagcactgtacattaagaggtggggagaatttgttgaacttataagaaaaaatcaattcaatttggaagatcctcatcaaaaggagttgtttttggcaatgctgatgacagcttgtgatctttctgcaattacaaaaccctggcctattcaacaacggatagcagaacttgtagcaactgaattttttgatcaaggagacagagagagaaaagaactcaacatagaacccactgatctaatgaacagggagaagaaaaacaaaatcccaagtatgcaagttgggttcatagatgccatctgcttgcaactgtatgaggccctgacccacgtgtcagaggactgtttccctttgctagatggctgcagaaagaacaggcagaaatggcaggcccttgcagaacagcag

SEQ ID NO: 8768 - DNA, 978 bp, Artificial Sequence
  source: /note="Description of Artificial Sequence: Synthetic Destabilizing Domain (DD)"
gaagaaacaagagagctacagtcgttagcggctgctgtggtgccatctgcccagacccttaaaattactgactttagcttcagtgactttgagctgtctgatctggaaacagcactgtgtacaattcggatgtttactgacctcaaccttgtgcagaacttccagatgaaacatgaggttctttgcagatggattttaagtgttaagaagaattatcggaagaatgttgcctatcataattggagacatgcctttaatacagctcagtgcatgtttgctgctctaaaagcaggcaaaattcagaacaagctgactgacctggagatacttgcattgctgattgctgcactaagccacgatttggatcaccgtggtgtgaataactcttacatacagcgaagtgaacatccacttgcccagctttactgccattcaatcatggaacaccatcattttgaccagtgcctgatgattcttaatagtccaggcaatcagattctcagtggcctctccattgaagaatataagaccacgttgaaaataatcaagcaagctattttagctacagacctagcactgtacattaagaggttgggagaattttgggaacttataagaaaaaatcaattcaatttggaagatcctcatcaaaaggagttgtttttggcaatgctgatgacagcttgtgatctttctgcaattacaaaaccctggcctattcaacaacggatagcagaacttgtagcaactgaattttttgatcaaggagacagagagagaaaagaactcaacatagaacccactgatctaatgaacagggagaagaaaaacaaaatcccaagtatgcaagttgggttcatagatgccatctgcttgcaactgtatgaggccctgacccacgtgtcagaggactgtttccctttgctagatggctgcagaaagaacaggcagaaatggcaggcccttgcagaacagcag

SEQ ID NO: 8769 - DNA, 978 bp, Artificial Sequence
  source: /note="Description of Artificial Sequence: Synthetic Destabilizing Domain (DD)"
gaagaaacaagagagctacagtcgttagcggctgctgtggtgccatctgcccagacccttaaaattactgactttagcttcagtgactttgagctgtctgatctggaaacagcactgtgtacaattcggatgtttactgacctcaaccttgtgcagaacttccagatgaaacatgaggttctttgcagatggattttaagtgttaagaagaattatcggaagaatgttgcctatcataattggagacatgcctttaatacagctcagtgcatgtttgctgctctaaaagcaggcaaaattcagaacaagctgactgacctggagatacttgcattgctgattgctgcactaagccacgatttggatcaccgtggtgtgaataactcttacatacagcgaagtgaacatccacttgcccagctttactgccattcaatcatggaacaccatcattttgaccagtgcctgatgattcttaatagtccaggcaatcagattctcagtggcctctccattgaagaatataagaccacgttgaaaataatcaagcaagctattttagctacagacctagcactgtacattaagaggccgggagaatttcaggaacttataagaaaaaatcaattcaatttggaagatcctcatcaaaaggagttgtttttggcaatgctgatgacagcttgtgatctttctgcaattacaaaaccctggcctattcaacaacggatagcagaacttgtagcaactgaattttttgatcaaggagacagagagagaaaagaactcaacatagaacccactgatctaatgaacagggagaagaaaaacaaaatcccaagtatgcaagttgggttcatagatgccatctgcttgcaactgtatgaggccctgacccacgtgtcagaggactgtttccctttgctagatggctgcagaaagaacaggcagaaatggcaggcccttgcagaacagcag

SEQ ID NO: 8770 - DNA, 978 bp, Artificial Sequence
  source: /note="Description of Artificial Sequence: Synthetic Destabilizing Domain (DD)"
gaagaaacaagagagctacagtcgttagcggctgctgtggtgccatctgcccagacccttaaaattactgactttagcttcagtgactttgagctgtctgatctggaaacagcactgtgtacaattcggatgtttactgacctcaaccttgtgcagaacttccagatgaaacatgaggttctttgcagatggattttaagtgttaagaagaattatcggaagaatgttgcctatcataattggagacatgcctttaatacagctcagtgcatgtttgctgctctaaaagcaggcaaaattcagaacaagctgactgacctggagatacttgcattgctgattgctgcactaagccacgatttggatcaccgtggtgtgaataactcttacatacagcgaagtgaacatccacttgcccagctttactgccattcaatcatggaacaccatcattttgaccagtgcctgatgattcttaatagtccaggcaatcagattctcagtggcctctccattgaagaatataagaccacgttgaaaataatcaagcaagctattttagctacagacctagcactgtacattaagagggctggagaatttgcggaacttataagaaaaaatcaattcaatttggaagatcctcatcaaaaggagttgtttttggcaatgctgatgacagcttgtgatctttctgcaattacaaaaccctggcctattcaacaacggatagcagaacttgtagcaactgaattttttgatcaaggagacagagagagaaaagaactcaacatagaacccactgatctaatgaacagggagaagaaaaacaaaatcccaagtatgcaagttgggttcatagatgccatctgcttgcaactgtatgaggccctgacccacgtgtcagaggactgtttccctttgctagatggctgcagaaagaacaggcagaaatggcaggcccttgcagaacagcag

SEQ ID NO: 8771 - DNA, 978 bp, Artificial Sequence
  source: /note="Description of Artificial Sequence: Synthetic Destabilizing Domain (DD)"
gaagaaacaagagagctacagtcgttagcggctgctgtggtgccatctgcccagacccttaaaattactgactttagcttcagtgactttgagctgtctgatctggaaacagcactgtgtacaattcggatgtttactgacctcaaccttgtgcagaacttccagatgaaacatgaggttctttgcagatggattttaagtgttaagaagaattatcggaagaatgttgcctatcataattggagacatgcctttaatacagctcagtgcatgtttgctgctctaaaagcaggcaaaattcagaacaagctgactgacctggagatacttgcattgctgattgctgcactaagccacgatttggatcaccgtggtgtgaataactcttacatacagcgaagtgaacatccacttgcccagctttactgccattcaatcatggaacaccatcattttgaccagtgcctgatgattcttaatagtccaggcaatcagattctcagtggcctctccattgaagaatataagaccacgttgaaaataatcaagcaagctattttagctacagacctagcactgtacattaagaggtctggagaatttggggaacttataagaaaaaatcaattcaatttggaagatcctcatcaaaaggagttgtttttggcaatgctgatgacagcttgtgatctttctgcaattacaaaaccctggcctattcaacaacggatagcagaacttgtagcaactgaattttttgatcaaggagacagagagagaaaagaactcaacatagaacccactgatctaatgaacagggagaagaaaaacaaaatcccaagtatgcaagttgggttcatagatgccatctgcttgcaactgtatgaggccctgacccacgtgtcagaggactgtttccctttgctagatggctgcagaaagaacaggcagaaatggcaggcccttgcagaacagcag

SEQ ID NO: 8772 - DNA, 978 bp, Artificial Sequence
  source: /note="Description of Artificial Sequence: Synthetic Destabilizing Domain (DD)"
gaagaaacaagagagctacagtcgttagcggctgctgtggtgccatctgcccagacccttaaaattactgactttagcttcagtgactttgagctgtctgatctggaaacagcactgtgtacaattcggatgtttactgacctcaaccttgtgcagaacttccagatgaaacatgaggttctttgcagatggattttaagtgttaagaagaattatcggaagaatgttgcctatcataattggagacatgcctttaatacagctcagtgcatgtttgctgctctaaaagcaggcaaaattcagaacaagctgactgacctggagatacttgcattgctgattgctgcactaagccacgatttggatcaccgtggtgtgaataactcttacatacagcgaagtgaacatccacttgcccagctttactgccattcaatcatggaacaccatcattttgaccagtgcctgatgattcttaatagtccaggcaatcagattctcagtggcctctccattgaagaatataagaccacgttgaaaataatcaagcaagctattttagctacagacctagcactgtacattaagaggacgggagaatttccggaacttataagaaaaaatcaattcaatttggaagatcctcatcaaaaggagttgtttttggcaatgctgatgacagcttgtgatctttctgcaattacaaaaccctggcctattcaacaacggatagcagaacttgtagcaactgaattttttgatcaaggagacagagagagaaaagaactcaacatagaacccactgatctaatgaacagggagaagaaaaacaaaatcccaagtatgcaagttgggttcatagatgccatctgcttgcaactgtatgaggccctgacccacgtgtcagaggactgtttccctttgctagatggctgcagaaagaacaggcagaaatggcaggcccttgcagaacagcag

SEQ ID NO: 8773 - DNA, 978 bp, Artificial Sequence
  source: /note="Description of Artificial Sequence: Synthetic Destabilizing Domain (DD)"
gaagaaacaagagagctacagtcgttagcggctgctgtggtgccatctgcccagacccttaaaattactgactttagcttcagtgactttgagctgtctgatctggaaacagcactgtgtacaattcggatgtttactgacctcaaccttgtgcagaacttccagatgaaacatgaggttctttgcagatggattttaagtgttaagaagaattatcggaagaatgttgcctatcataattggagacatgcctttaatacagctcagtgcatgtttgctgctctaaaagcaggcaaaattcagaacaagctgactgacctggagatacttgcattgctgattgctgcactaagccacgatttggatcaccgtggtgtgaataactcttacatacagcgaagtgaacatccacttgcccagctttactgccattcaatcatggaacaccatcattttgaccagtgcctgatgattcttaatagtccaggcaatcagattctcagtggcctctccattgaagaatataagaccacgttgaaaataatcaagcaagctattttagctacagacctagcactgtacattaagaggatgggagaatttcatgaacttataagaaaaaatcaattcaatttggaagatcctcatcaaaaggagttgtttttggcaatgctgatgacagcttgtgatctttctgcaattacaaaaccctggcctattcaacaacggatagcagaacttgtagcaactgaattttttgatcaaggagacagagagagaaaagaactcaacatagaacccactgatctaatgaacagggagaagaaaaacaaaatcccaagtatgcaagttgggttcatagatgccatctgcttgcaactgtatgaggccctgacccacgtgtcagaggactgtttccctttgctagatggctgcagaaagaacaggcagaaatggcaggcccttgcagaacagcag

SEQ ID NO: 8774 - DNA, 978 bp, Artificial Sequence
  source: /note="Description of Artificial Sequence: Synthetic Destabilizing Domain (DD)"
gaagaaacaagagagctacagtcgttagcggctgctgtggtgccatctgcccagacccttaaaattactgactttagcttcagtgactttgagctgtctgatctggaaacagcactgtgtacaattcggatgtttactgacctcaaccttgtgcagaacttccagatgaaacatgaggttctttgcagatggattttaagtgttaagaagaattatcggaagaatgttgcctatcataattggagacatgcctttaatacagctcagtgcatgtttgctgctctaaaagcaggcaaaattcagaacaagctgactgacctggagatacttgcattgctgattgctgcactaagccacgatttggatcaccgtggtgtgaataactcttacatacagcgaagtgaacatccacttgcccagctttactgccattcaatcatggaacaccatcattttgaccagtgcctgatgattcttaatagtccaggcaatcagattctcagtggcctctccattgaagaatataagaccacgttgaaaataatcaagcaagctattttagctacagacctagcactgtacattaagaggtatggagaatttatggaacttataagaaaaaatcaattcaatttggaagatcctcatcaaaaggagttgtttttggcaatgctgatgacagcttgtgatctttctgcaattacaaaaccctggcctattcaacaacggatagcagaacttgtagcaactgaattttttgatcaaggagacagagagagaaaagaactcaacatagaacccactgatctaatgaacagggagaagaaaaacaaaatcccaagtatgcaagttgggttcatagatgccatctgcttgcaactgtatgaggccctgacccacgtgtcagaggactgtttccctttgctagatggctgcagaaagaacaggcagaaatggcaggcccttgcagaacagcag

SEQ ID NO: 8775 - DNA, 978 bp, Artificial Sequence
  source: /note="Description of Artificial Sequence: Synthetic Destabilizing Domain (DD)"
gaagaaacaagagagctacagtcgttagcggctgctgtggtgccatctgcccagacccttaaaattactgactttagcttcagtgactttgagctgtctgatctggaaacagcactgtgtacaattcggatgtttactgacctcaaccttgtgcagaacttccagatgaaacatgaggttctttgcagatggattttaagtgttaagaagaattatcggaagaatgttgcctatcataattggagacatgcctttaatacagctcagtgcatgtttgctgctctaaaagcaggcaaaattcagaacaagctgactgacctggagatacttgcattgctgattgctgcactaagccacgatttggatcaccgtggtgtgaataactcttacatacagcgaagtgaacatccacttgcccagctttactgccattcaatcatggaacaccatcattttgaccagtgcctgatgattcttaatagtccaggcaatcagattctcagtggcctctccattgaagaatataagaccacgttgaaaataatcaagcaagctattttagctacagacctagcactgtacattaagaggcctggagaatttgatgaacttataagaaaaaatcaattcaatttggaagatcctcatcaaaaggagttgtttttggcaatgctgatgacagcttgtgatctttctgcaattacaaaaccctggcctattcaacaacggatagcagaacttgtagcaactgaattttttgatcaaggagacagagagagaaaagaactcaacatagaacccactgatctaatgaacagggagaagaaaaacaaaatcccaagtatgcaagttgggttcatagatgccatctgcttgcaactgtatgaggccctgacccacgtgtcagaggactgtttccctttgctagatggctgcagaaagaacaggcagaaatggcaggcccttgcagaacagcag

SEQ ID NO: 8776 - DNA, 978 bp, Artificial Sequence
  source: /note="Description of Artificial Sequence: Synthetic Destabilizing Domain (DD)"
gaagaaacaagagagctacagtcgttagcggctgctgtggtgccatctgcccagacccttaaaattactgactttagcttcagtgactttgagctgtctgatctggaaacagcactgtgtacaattcggatgtttactgacctcaaccttgtgcagaacttccagatgaaacatgaggttctttgcagatggattttaagtgttaagaagaattatcggaagaatgttgcctatcataattggagacatgcctttaatacagctcagtgcatgtttgctgctctaaaagcaggcaaaattcagaacaagctgactgacctggagatacttgcattgctgattgctgcactaagccacgatttggatcaccgtggtgtgaataactcttacatacagcgaagtgaacatccacttgcccagctttactgccattcaatcatggaacaccatcattttgaccagtgcctgatgattcttaatagtccaggcaatcagattctcagtggcctctccattgaagaatataagaccacgttgaaaataatcaagcaagctattttagctacagacctagcactgtacattaagaggcctggagaatttggggaacttataagaaaaaatcaattcaatttggaagatcctcatcaaaaggagttgtttttggcaatgctgatgacagcttgtgatctttctgcaattacaaaaccctggcctattcaacaacggatagcagaacttgtagcaactgaattttttgatcaaggagacagagagagaaaagaactcaacatagaacccactgatctaatgaacagggagaagaaaaacaaaatcccaagtatgcaagttgggttcatagatgccatctgcttgcaactgtatgaggccctgacccacgtgtcagaggactgtttccctttgctagatggctgcagaaagaacaggcagaaatggcaggcccttgcagaacagcag

SEQ ID NO: 8777 - DNA, 978 bp, Artificial Sequence
  source: /note="Description of Artificial Sequence: Synthetic Destabilizing Domain (DD)"
gaagaaacaagagagctacagtcgttagcggctgctgtggtgccatctgcccagacccttaaaattactgactttagcttcagtgactttgagctgtctgatctggaaacagcactgtgtacaattcggatgtttactgacctcaaccttgtgcagaacttccagatgaaacatgaggttctttgcagatggattttaagtgttaagaagaattatcggaagaatgttgcctatcataattggagacatgcctttaatacagctcagtgcatgtttgctgctctaaaagcaggcaaaattcagaacaagctgactgacctggagatacttgcattgctgattgctgcactaagccacgatttggatcaccgtggtgtgaataactcttacatacagcgaagtgaacatccacttgcccagctttactgccattcaatcatggaacaccatcattttgaccagtgcctgatgattcttaatagtccaggcaatcagattctcagtggcctctccattgaagaatataagaccacgttgaaaataatcaagcaagctattttagctacagacctagcactgtacattaagaggtggggagaatttttggaacttataagaaaaaatcaattcaatttggaagatcctcatcaaaaggagttgtttttggcaatgctgatgacagcttgtgatctttctgcaattacaaaaccctggcctattcaacaacggatagcagaacttgtagcaactgaattttttgatcaaggagacagagagagaaaagaactcaacatagaacccactgatctaatgaacagggagaagaaaaacaaaatcccaagtatgcaagttgggttcatagatgccatctgcttgcaactgtatgaggccctgacccacgtgtcagaggactgtttccctttgctagatggctgcagaaagaacaggcagaaatggcaggcccttgcagaacagcag

SEQ ID NO: 8778 - DNA, 978 bp, Artificial Sequence
  source: /note="Description of Artificial Sequence: Synthetic Destabilizing Domain (DD)"
gaagaaacaagagagctacagtcgttagcggctgctgtggtgccatctgcccagacccttaaaattactgactttagcttcagtgactttgagctgtctgatctggaaacagcactgtgtacaattcggatgtttactgacctcaaccttgtgcagaacttccagatgaaacatgaggttctttgcagatggattttaagtgttaagaagaattatcggaagaatgttgcctatcataattggagacatgcctttaatacagctcagtgcatgtttgctgctctaaaagcaggcaaaattcagaacaagctgactgacctggagatacttgcattgctgattgctgcactaagccacgatttggatcaccgtggtgtgaataactcttacatacagcgaagtgaacatccacttgcccagctttactgccattcaatcatggaacaccatcattttgaccagtgcctgatgattcttaatagtccaggcaatcagattctcagtggcctctccattgaagaatataagaccacgttgaaaataatcaagcaagctattttagctacagacctagcactgtacattaagaggttgggagaatttagtgaacttataagaaaaaatcaattcaatttggaagatcctcatcaaaaggagttgtttttggcaatgctgatgacagcttgtgatctttctgcaattacaaaaccctggcctattcaacaacggatagcagaacttgtagcaactgaattttttgatcaaggagacagagagagaaaagaactcaacatagaacccactgatctaatgaacagggagaagaaaaacaaaatcccaagtatgcaagttgggttcatagatgccatctgcttgcaactgtatgaggccctgacccacgtgtcagaggactgtttccctttgctagatggctgcagaaagaacaggcagaaatggcaggcccttgcagaacagcag

SEQ ID NO: 8779 - DNA, 978 bp, Artificial Sequence
  source: /note="Description of Artificial Sequence: Synthetic Destabilizing Domain (DD)"
gaagaaacaagagagctacagtcgttagcggctgctgtggtgccatctgcccagacccttaaaattactgactttagcttcagtgactttgagctgtctgatctggaaacagcactgtgtacaattcggatgtttactgacctcaaccttgtgcagaacttccagatgaaacatgaggttctttgcagatggattttaagtgttaagaagaattatcggaagaatgttgcctatcataattggagacatgcctttaatacagctcagtgcatgtttgctgctctaaaagcaggcaaaattcagaacaagctgactgacctggagatacttgcattgctgattgctgcactaagccacgatttggatcaccgtggtgtgaataactcttacatacagcgaagtgaacatccacttgcccagctttactgccattcaatcatggaacaccatcattttgaccagtgcctgatgattcttaatagtccaggcaatcagattctcagtggcctctccattgaagaatataagaccacgttgaaaataatcaagcaagctattttagctacagacctagcactgtacattaagagggatggagaatttacggaacttataagaaaaaatcaattcaatttggaagatcctcatcaaaaggagttgtttttggcaatgctgatgacagcttgtgatctttctgcaattacaaaaccctggcctattcaacaacggatagcagaacttgtagcaactgaattttttgatcaaggagacagagagagaaaagaactcaacatagaacccactgatctaatgaacagggagaagaaaaacaaaatcccaagtatgcaagttgggttcatagatgccatctgcttgcaactgtatgaggccctgacccacgtgtcagaggactgtttccctttgctagatggctgcagaaagaacaggcagaaatggcaggcccttgcagaacagcag

SEQ ID NO: 8780 - DNA, 978 bp, Artificial Sequence
  source: /note="Description of Artificial Sequence: Synthetic Destabilizing Domain (DD)"
gaagaaacaagagagctacagtcgttagcggctgctgtggtgccatctgcccagacccttaaaattactgactttagcttcagtgactttgagctgtctgatctggaaacagcactgtgtacaattcggatgtttactgacctcaaccttgtgcagaacttccagatgaaacatgaggttctttgcagatggattttaagtgttaagaagaattatcggaagaatgttgcctatcataattggagacatgcctttaatacagctcagtgcatgtttgctgctctaaaagcaggcaaaattcagaacaagctgactgacctggagatacttgcattgctgattgctgcactaagccacgatttggatcaccgtggtgtgaataactcttacatacagcgaagtgaacatccacttgcccagctttactgccattcaatcatggaacaccatcattttgaccagtgcctgatgattcttaatagtccaggcaatcagattctcagtggcctctccattgaagaatataagaccacgttgaaaataatcaagcaagctattttagctacagacctagcactgtacattaagaggttgggagaatttgttgaacttataagaaaaaatcaattcaatttggaagatcctcatcaaaaggagttgtttttggcaatgctgatgacagcttgtgatctttctgcaattacaaaaccctggcctattcaacaacggatagcagaacttgtagcaactgaattttttgatcaaggagacagagagagaaaagaactcaacatagaacccactgatctaatgaacagggagaagaaaaacaaaatcccaagtatgcaagttgggttcatagatgccatctgcttgcaactgtatgaggccctgacccacgtgtcagaggactgtttccctttgctagatggctgcagaaagaacaggcagaaatggcaggcccttgcagaacagcag

SEQ ID NO: 8781 - DNA, 978 bp, Artificial Sequence
  source: /note="Description of Artificial Sequence: Synthetic Destabilizing Domain (DD)"
gaagaaacaagagagctacagtcgttagcggctgctgtggtgccatctgcccagacccttaaaattactgactttagcttcagtgactttgagctgtctgatctggaaacagcactgtgtacaattcggatgtttactgacctcaaccttgtgcagaacttccagatgaaacatgaggttctttgcagatggattttaagtgttaagaagaattatcggaagaatgttgcctatcataattggagacatgcctttaatacagctcagtgcatgtttgctgctctaaaagcaggcaaaattcagaacaagctgactgacctggagatacttgcattgctgattgctgcactaagccacgatttggatcaccgtggtgtgaataactcttacatacagcgaagtgaacatccacttgcccagctttactgccattcaatcatggaacaccatcattttgaccagtgcctgatgattcttaatagtccaggcaatcagattctcagtggcctctccattgaagaatataagaccacgttgaaaataatcaagcaagctattttagctacagacctagcactgtacattaagagggggggagaatttgttgaacttataagaaaaaatcaattcaatttggaagatcctcatcaaaaggagttgtttttggcaatgctgatgacagcttgtgatctttctgcaattacaaaaccctggcctattcaacaacggatagcagaacttgtagcaactgaattttttgatcaaggagacagagagagaaaagaactcaacatagaacccactgatctaatgaacagggagaagaaaaacaaaatcccaagtatgcaagttgggttcatagatgccatctgcttgcaactgtatgaggccctgacccacgtgtcagaggactgtttccctttgctagatggctgcagaaagaacaggcagaaatggcaggcccttgcagaacagcag

SEQ ID NO: 8782 - DNA, 978 bp, Artificial Sequence
  source: /note="Description of Artificial Sequence: Synthetic Destabilizing Domain (DD)"
gaagaaacaagagagctacagtcgttagcggctgctgtggtgccatctgcccagacccttaaaattactgactttagcttcagtgactttgagctgtctgatctggaaacagcactgtgtacaattcggatgtttactgacctcaaccttgtgcagaacttccagatgaaacatgaggttctttgcagatggattttaagtgttaagaagaattatcggaagaatgttgcctatcataattggagacatgcctttaatacagctcagtgcatgtttgctgctctaaaagcaggcaaaattcagaacaagctgactgacctggagatacttgcattgctgattgctgcactaagccacgatttggatcaccgtggtgtgaataactcttacatacagcgaagtgaacatccacttgcccagctttactgccattcaatcatggaacaccatcattttgaccagtgcctgatgattcttaatagtccaggcaatcagattctcagtggcctctccattgaagaatataagaccacgttgaaaataatcaagcaagctattttagctacagacctagcactgtacattaagaggtggggagaatttgctgaacttataagaaaaaatcaattcaatttggaagatcctcatcaaaaggagttgtttttggcaatgctgatgacagcttgtgatctttctgcaattacaaaaccctggcctattcaacaacggatagcagaacttgtagcaactgaattttttgatcaaggagacagagagagaaaagaactcaacatagaacccactgatctaatgaacagggagaagaaaaacaaaatcccaagtatgcaagttgggttcatagatgccatctgcttgcaactgtatgaggccctgacccacgtgtcagaggactgtttccctttgctagatggctgcagaaagaacaggcagaaatggcaggcccttgcagaacagcag

SEQ ID NO: 8783 - DNA, 15 bp, Artificial Sequence
  source: /note="Description of Artificial Sequence: Synthetic Linker"
ggtagtctagatgga

SEQ ID NO: 8784 - DNA, 57 bp, Artificial Sequence
  source: /note="Description of Artificial Sequence: Synthetic Cleavage site"
gctactaacttcagcctgctgaagcaggctggagacgtggaggagaaccctggacct

SEQ ID NO: 8785 - DNA, 1704 bp, Artificial Sequence
  source: /note="Description of Artificial Sequence: Synthetic Construct"
atggtgagcaagggcgccgagctgttcaccggcatcgtgcccatcctgatcgagctgaatggcgatgtgaatggccacaagttcagcgtgagcggcgagggcgagggcgatgccacctacggcaagctgaccctgaagttcatctgcaccaccggcaagctgcctgtgccctggcccaccctggtgaccaccctgagctacggcgtgcagtgcttctcacgctaccccgatcacatgaagcagcacgacttcttcaagagcgccatgcctgagggctacatccaggagcgcaccatcttcttcgaggatgacggcaactacaagtcgcgcgccgaggtgaagttcgagggcgataccctggtgaatcgcatcgagctgaccggcaccgatttcaaggaggatggcaacatcctgggcaataagatggagtacaactacaacgcccacaatgtgtacatcatgaccgacaaggccaagaatggcatcaaggtgaacttcaagatccgccacaacatcgaggatggcagcgtgcagctggccgaccactaccagcagaatacccccatcggcgatggccctgtgctgctgcccgataaccactacctgtccacccagagcgccctgtccaaggaccccaacgagaagcgcgatcacatgatctacttcggcttcgtgaccgccgccgccatcacccacggcatggatgagctgtacaagggatccgaagaaacaagagagctacagtcgttagcggctgctgtggtgccatctgcccagacccttaaaattactgactttagcttcagtgactttgagctgtctgatctggaaacagcactgtgtacaattcggatgtttactgacctcaaccttgtgcagaacttccagatgaaacatgaggttctttgcagatggattttaagtgttaagaagaattatcggaagaatgttgcctatcataattggagacatgcctttaatacagctcagtgcatgtttgctgctctaaaagcaggcaaaattcagaacaagctgactgacctggagatacttgcattgctgattgctgcactaagccacgatttggatcaccgtggtgtgaataactcttacatacagcgaagtgaacatccacttgcccagctttactgccattcaatcatggaacaccatcattttgaccagtgcctgatgattcttaatagtccaggcaatcagattctcagtggcctctccattgaagaatataagaccacgttgaaaataatcaagcaagctattttagctacagacctagcactgtacattaagagggatggagaatttagtgaacttataagaaaaaatcaattcaatttggaagatcctcatcaaaaggagttgtttttggcaatgctgatgacagcttgtgatctttctgcaattacaaaaccctggcctattcaacaacggatagcagaacttgtagcaactgaattttttgatcaaggagacagagagagaaaagaactcaacatagaacccactgatctaatgaacagggagaagaaaaacaaaatcccaagtatgcaagttgggttcatagatgccatctgcttgcaactgtatgaggccctgacccacgtgtcagaggactgtttccctttgctagatggctgcagaaagaacaggcagaaatggcaggcccttgcagaacagcagtga

SEQ ID NO: 8786 - DNA, 1704 bp, Artificial Sequence
  source: /note="Description of Artificial Sequence: Synthetic Construct"
atggtgagcaagggcgccgagctgttcaccggcatcgtgcccatcctgatcgagctgaatggcgatgtgaatggccacaagttcagcgtgagcggcgagggcgagggcgatgccacctacggcaagctgaccctgaagttcatctgcaccaccggcaagctgcctgtgccctggcccaccctggtgaccaccctgagctacggcgtgcagtgcttctcacgctaccccgatcacatgaagcagcacgacttcttcaagagcgccatgcctgagggctacatccaggagcgcaccatcttcttcgaggatgacggcaactacaagtcgcgcgccgaggtgaagttcgagggcgataccctggtgaatcgcatcgagctgaccggcaccgatttcaaggaggatggcaacatcctgggcaataagatggagtacaactacaacgcccacaatgtgtacatcatgaccgacaaggccaagaatggcatcaaggtgaacttcaagatccgccacaacatcgaggatggcagcgtgcagctggccgaccactaccagcagaatacccccatcggcgatggccctgtgctgctgcccgataaccactacctgtccacccagagcgccctgtccaaggaccccaacgagaagcgcgatcacatgatctacttcggcttcgtgaccgccgccgccatcacccacggcatggatgagctgtacaagggatccgaagaaacaagagagctacagtcgttagcggctgctgtggtgccatctgcccagacccttaaaattactgactttagcttcagtgactttgagctgtctgatctggaaacagcactgtgtacaattcggatgtttactgacctcaaccttgtgcagaacttccagatgaaacatgaggttctttgcagatggattttaagtgttaagaagaattatcggaagaatgttgcctatcataattggagacatgcctttaatacagctcagtgcatgtttgctgctctaaaagcaggcaaaattcagaacaagctgactgacctggagatacttgcattgctgattgctgcactaagccacgatttggatcaccgtggtgtgaataactcttacatacagcgaagtgaacatccacttgcccagctttactgccattcaatcatggaacaccatcattttgaccagtgcctgatgattcttaatagtccaggcaatcagattctcagtggcctctccattgaagaatataagaccacgttgaaaataatcaagcaagctattttagctacagacctagcactgtacattaagagggagggagaatttgatgaacttataagaaaaaatcaattcaatttggaagatcctcatcaaaaggagttgtttttggcaatgctgatgacagcttgtgatctttctgcaattacaaaaccctggcctattcaacaacggatagcagaacttgtagcaactgaattttttgatcaaggagacagagagagaaaagaactcaacatagaacccactgatctaatgaacagggagaagaaaaacaaaatcccaagtatgcaagttgggttcatagatgccatctgcttgcaactgtatgaggccctgacccacgtgtcagaggactgtttccctttgctagatggctgcagaaagaacaggcagaaatggcaggcccttgcagaacagcagtga

SEQ ID NO: 8787 - DNA, 2481 bp, Artificial Sequence
  source: /note="Description of Artificial Sequence: Synthetic Construct"
atggtgagcaagggcgccgagctgttcaccggcatcgtgcccatcctgatcgagctgaatggcgatgtgaatggccacaagttcagcgtgagcggcgagggcgagggcgatgccacctacggcaagctgaccctgaagttcatctgcaccaccggcaagctgcctgtgccctggcccaccctggtgaccaccctgagctacggcgtgcagtgcttctcacgctaccccgatcacatgaagcagcacgacttcttcaagagcgccatgcctgagggctacatccaggagcgcaccatcttcttcgaggatgacggcaactacaagtcgcgcgccgaggtgaagttcgagggcgataccctggtgaatcgcatcgagctgaccggcaccgatttcaaggaggatggcaacatcctgggcaataagatggagtacaactacaacgcccacaatgtgtacatcatgaccgacaaggccaagaatggcatcaaggtgaacttcaagatccgccacaacatcgaggatggcagcgtgcagctggccgaccactaccagcagaatacccccatcggcgatggccctgtgctgctgcccgataaccactacctgtccacccagagcgccctgtccaaggaccccaacgagaagcgcgatcacatgatctacttcggcttcgtgaccgccgccgccatcacccacggcatggatgagctgtacaagggatccgaagaaacaagagagctacagtcgttagcggctgctgtggtgccatctgcccagacccttaaaattactgactttagcttcagtgactttgagctgtctgatctggaaacagcactgtgtacaattcggatgtttactgacctcaaccttgtgcagaacttccagatgaaacatgaggttctttgcagatggattttaagtgttaagaagaattatcggaagaatgttgcctatcataattggagacatgcctttaatacagctcagtgcatgtttgctgctctaaaagcaggcaaaattcagaacaagctgactgacctggagatacttgcattgctgattgctgcactaagccacgatttggatcaccgtggtgtgaataactcttacatacagcgaagtgaacatccacttgcccagctttactgccattcaatcatggaacaccatcattttgaccagtgcctgatgattcttaatagtccaggcaatcagattctcagtggcctctccattgaagaatataagaccacgttgaaaataatcaagcaagctattttagctacagacctagcactgtacattaagagggttggagaatttggtgaacttataagaaaaaatcaattcaatttggaagatcctcatcaaaaggagttgtttttggcaatgctgatgacagcttgtgatctttctgcaattacaaaaccctggcctattcaacaacggatagcagaacttgtagcaactgaattttttgatcaaggagacagagagagaaaagaactcaacatagaacccactgatctaatgaacagggagaagaaaaacaaaatcccaagtatgcaagttgggttcatagatgccatctgcttgcaactgtatgaggccctgacccacgtgtcagaggactgtttccctttgctagatggctgcagaaagaacaggcagaaatggcaggcccttgcagaacagcagggtagtctagatggagctactaacttcagcctgctgaagcaggctggagacgtggaggagaaccctggacctttgagcaagggcgaggaggacaacatggccatcatcaaggagttcatgcgcttcaaggtgcacatggagggctccgtgaacggccacgagttcgagatcgagggcgagggcgagggccgcccctacgagggcacccagaccgccaagctgaaggtgaccaagggcggccccctgcccttcgcctgggacatcctgtcccctcagttcatgtacggctccaaggcctacgtgaagcaccccgccgacatccccgactacttgaagctgtccttccccgagggcttcaagtgggagcgcgtgatgaacttcgaggacggcggcgtggtgaccgtgacccaggactcctccctgcaggacggcgagttcatctacaaggtgaagctgcgcggcaccaacttcccctccgacggccccgtaatgcagaagaagaccatgggctgggaggcctcctccgagcggatgtaccccgaggacggcgccctgaagggcgagatcaagcagaggctgaagctgaaggacggcggccactacgacgccgaggtcaagaccacctacaaggccaagaagcccgtgcagctgcccggcgcctacaacgtcaacatcaagctggacatcacctcccacaacgaggactacaccatcgtggaacagtacgagcgcgccgagggccgccactccaccggcggcatggacgagctgtacaagtaa

SEQ ID NO: 8788 - DNA, 2481 bp, Artificial Sequence
  source: /note="Description of Artificial Sequence: Synthetic Construct"
atggtgagcaagggcgccgagctgttcaccggcatcgtgcccatcctgatcgagctgaatggcgatgtgaatggccacaagttcagcgtgagcggcgagggcgagggcgatgccacctacggcaagctgaccctgaagttcatctgcaccaccggcaagctgcctgtgccctggcccaccctggtgaccaccctgagctacggcgtgcagtgcttctcacgctaccccgatcacatgaagcagcacgacttcttcaagagcgccatgcctgagggctacatccaggagcgcaccatcttcttcgaggatgacggcaactacaagtcgcgcgccgaggtgaagttcgagggcgataccctggtgaatcgcatcgagctgaccggcaccgatttcaaggaggatggcaacatcctgggcaataagatggagtacaactacaacgcccacaatgtgtacatcatgaccgacaaggccaagaatggcatcaaggtgaacttcaagatccgccacaacatcgaggatggcagcgtgcagctggccgaccactaccagcagaatacccccatcggcgatggccctgtgctgctgcccgataaccactacctgtccacccagagcgccctgtccaaggaccccaacgagaagcgcgatcacatgatctacttcggcttcgtgaccgccgccgccatcacccacggcatggatgagctgtacaagggatccgaagaaacaagagagctacagtcgttagcggctgctgtggtgccatctgcccagacccttaaaattactgactttagcttcagtgactttgagctgtctgatctggaaacagcactgtgtacaattcggatgtttactgacctcaaccttgtgcagaacttccagatgaaacatgaggttctttgcagatggattttaagtgttaagaagaattatcggaagaatgttgcctatcataattggagacatgcctttaatacagctcagtgcatgtttgctgctctaaaagcaggcaaaattcagaacaagctgactgacctggagatacttgcattgctgattgctgcactaagccacgatttggatcaccgtggtgtgaataactcttacatacagcgaagtgaacatccacttgcccagctttactgccattcaatcatggaacaccatcattttgaccagtgcctgatgattcttaatagtccaggcaatcagattctcagtggcctctccattgaagaatataagaccacgttgaaaataatcaagcaagctattttagctacagacctagcactgtacattaagaggtggggagaatttggggaacttataagaaaaaatcaattcaatttggaagatcctcatcaaaaggagttgtttttggcaatgctgatgacagcttgtgatctttctgcaattacaaaaccctggcctattcaacaacggatagcagaacttgtagcaactgaattttttgatcaaggagacagagagagaaaagaactcaacatagaacccactgatctaatgaacagggagaagaaaaacaaaatcccaagtatgcaagttgggttcatagatgccatctgcttgcaactgtatgaggccctgacccacgtgtcagaggactgtttccctttgctagatggctgcagaaagaacaggcagaaatggcaggcccttgcagaacagcagggtagtctagatggagctactaacttcagcctgctgaagcaggctggagacgtggaggagaaccctggacctttgagcaagggcgaggaggacaacatggccatcatcaaggagttcatgcgcttcaaggtgcacatggagggctccgtgaacggccacgagttcgagatcgagggcgagggcgagggccgcccctacgagggcacccagaccgccaagctgaaggtgaccaagggcggccccctgcccttcgcctgggacatcctgtcccctcagttcatgtacggctccaaggcctacgtgaagcaccccgccgacatccccgactacttgaagctgtccttccccgagggcttcaagtgggagcgcgtgatgaacttcgaggacggcggcgtggtgaccgtgacccaggactcctccctgcaggacggcgagttcatctacaaggtgaagctgcgcggcaccaacttcccctccgacggccccgtaatgcagaagaagaccatgggctgggaggcctcctccgagcggatgtaccccgaggacggcgccctgaagggcgagatcaagcagaggctgaagctgaaggacggcggccactacgacgccgaggtcaagaccacctacaaggccaagaagcccgtgcagctgcccggcgcctacaacgtcaacatcaagctggacatcacctcccacaacgaggactacaccatcgtggaacagtacgagcgcgccgagggccgccactccaccggcggcatggacgagctgtacaagtaa

SEQ ID NO: 8789 - DNA, 2481 bp, Artificial Sequence
  source: /note="Description of Artificial Sequence: Synthetic Construct"
atggtgagcaagggcgccgagctgttcaccggcatcgtgcccatcctgatcgagctgaatggcgatgtgaatggccacaagttcagcgtgagcggcgagggcgagggcgatgccacctacggcaagctgaccctgaagttcatctgcaccaccggcaagctgcctgtgccctggcccaccctggtgaccaccctgagctacggcgtgcagtgcttctcacgctaccccgatcacatgaagcagcacgacttcttcaagagcgccatgcctgagggctacatccaggagcgcaccatcttcttcgaggatgacggcaactacaagtcgcgcgccgaggtgaagttcgagggcgataccctggtgaatcgcatcgagctgaccggcaccgatttcaaggaggatggcaacatcctgggcaataagatggagtacaactacaacgcccacaatgtgtacatcatgaccgacaaggccaagaatggcatcaaggtgaacttcaagatccgccacaacatcgaggatggcagcgtgcagctggccgaccactaccagcagaatacccccatcggcgatggccctgtgctgctgcccgataaccactacctgtccacccagagcgccctgtccaaggaccccaacgagaagcgcgatcacatgatctacttcggcttcgtgaccgccgccgccatcacccacggcatggatgagctgtacaagggatccgaagaaacaagagagctacagtcgttagcggctgctgtggtgccatctgcccagacccttaaaattactgactttagcttcagtgactttgagctgtctgatctggaaacagcactgtgtacaattcggatgtttactgacctcaaccttgtgcagaacttccagatgaaacatgaggttctttgcagatggattttaagtgttaagaagaattatcggaagaatgttgcctatcataattggagacatgcctttaatacagctcagtgcatgtttgctgctctaaaagcaggcaaaattcagaacaagctgactgacctggagatacttgcattgctgattgctgcactaagccacgatttggatcaccgtggtgtgaataactcttacatacagcgaagtgaacatccacttgcccagctttactgccattcaatcatggaacaccatcattttgaccagtgcctgatgattcttaatagtccaggcaatcagattctcagtggcctctccattgaagaatataagaccacgttgaaaataatcaagcaagctattttagctacagacctagcactgtacattaagaggtggggagaatttgttgaacttataagaaaaaatcaattcaatttggaagatcctcatcaaaaggagttgtttttggcaatgctgatgacagcttgtgatctttctgcaattacaaaaccctggcctattcaacaacggatagcagaacttgtagcaactgaattttttgatcaaggagacagagagagaaaagaactcaacatagaacccactgatctaatgaacagggagaagaaaaacaaaatcccaagtatgcaagttgggttcatagatgccatctgcttgcaactgtatgaggccctgacccacgtgtcagaggactgtttccctttgctagatggctgcagaaagaacaggcagaaatggcaggcccttgcagaacagcagggtagtctagatggagctactaacttcagcctgctgaagcaggctggagacgtggaggagaaccctggacctttgagcaagggcgaggaggacaacatggccatcatcaaggagttcatgcgcttcaaggtgcacatggagggctccgtgaacggccacgagttcgagatcgagggcgagggcgagggccgcccctacgagggcacccagaccgccaagctgaaggtgaccaagggcggccccctgcccttcgcctgggacatcctgtcccctcagttcatgtacggctccaaggcctacgtgaagcaccccgccgacatccccgactacttgaagctgtccttccccgagggcttcaagtgggagcgcgtgatgaacttcgaggacggcggcgtggtgaccgtgacccaggactcctccctgcaggacggcgagttcatctacaaggtgaagctgcgcggcaccaacttcccctccgacggccccgtaatgcagaagaagaccatgggctgggaggcctcctccgagcggatgtaccccgaggacggcgccctgaagggcgagatcaagcagaggctgaagctgaaggacggcggccactacgacgccgaggtcaagaccacctacaaggccaagaagcccgtgcagctgcccggcgcctacaacgtcaacatcaagctggacatcacctcccacaacgaggactacaccatcgtggaacagtacgagcgcgccgagggccgccactccaccggcggcatggacgagctgtacaagtaa

SEQ ID NO: 8790 - DNA, 2481 bp, Artificial Sequence
  source: /note="Description of Artificial Sequence: Synthetic Construct"
atggtgagcaagggcgccgagctgttcaccggcatcgtgcccatcctgatcgagctgaatggcgatgtgaatggccacaagttcagcgtgagcggcgagggcgagggcgatgccacctacggcaagctgaccctgaagttcatctgcaccaccggcaagctgcctgtgccctggcccaccctggtgaccaccctgagctacggcgtgcagtgcttctcacgctaccccgatcacatgaagcagcacgacttcttcaagagcgccatgcctgagggctacatccaggagcgcaccatcttcttcgaggatgacggcaactacaagtcgcgcgccgaggtgaagttcgagggcgataccctggtgaatcgcatcgagctgaccggcaccgatttcaaggaggatggcaacatcctgggcaataagatggagtacaactacaacgcccacaatgtgtacatcatgaccgacaaggccaagaatggcatcaaggtgaacttcaagatccgccacaacatcgaggatggcagcgtgcagctggccgaccactaccagcagaatacccccatcggcgatggccctgtgctgctgcccgataaccactacctgtccacccagagcgccctgtccaaggaccccaacgagaagcgcgatcacatgatctacttcggcttcgtgaccgccgccgccatcacccacggcatggatgagctgtacaagggatccgaagaaacaagagagctacagtcgttagcggctgctgtggtgccatctgcccagacccttaaaattactgactttagcttcagtgactttgagctgtctgatctggaaacagcactgtgtacaattcggatgtttactgacctcaaccttgtgcagaacttccagatgaaacatgaggttctttgcagatggattttaagtgttaagaagaattatcggaagaatgttgcctatcataattggagacatgcctttaatacagctcagtgcatgtttgctgctctaaaagcaggcaaaattcagaacaagctgactgacctggagatacttgcattgctgattgctgcactaagccacgatttggatcaccgtggtgtgaataactcttacatacagcgaagtgaacatccacttgcccagctttactgccattcaatcatggaacaccatcattttgaccagtgcctgatgattcttaatagtccaggcaatcagattctcagtggcctctccattgaagaatataagaccacgttgaaaataatcaagcaagctattttagctacagacctagcactgtacattaagaggttgggagaattttgggaacttataagaaaaaatcaattcaatttggaagatcctcatcaaaaggagttgtttttggcaatgctgatgacagcttgtgatctttctgcaattacaaaaccctggcctattcaacaacggatagcagaacttgtagcaactgaattttttgatcaaggagacagagagagaaaagaactcaacatagaacccactgatctaatgaacagggagaagaaaaacaaaatcccaagtatgcaagttgggttcatagatgccatctgcttgcaactgtatgaggccctgacccacgtgtcagaggactgtttccctttgctagatggctgcagaaagaacaggcagaaatggcaggcccttgcagaacagcagggtagtctagatggagctactaacttcagcctgctgaagcaggctggagacgtggaggagaaccctggacctttgagcaagggcgaggaggacaacatggccatcatcaaggagttcatgcgcttcaaggtgcacatggagggctccgtgaacggccacgagttcgagatcgagggcgagggcgagggccgcccctacgagggcacccagaccgccaagctgaaggtgaccaagggcggccccctgcccttcgcctgggacatcctgtcccctcagttcatgtacggctccaaggcctacgtgaagcaccccgccgacatccccgactacttgaagctgtccttccccgagggcttcaagtgggagcgcgtgatgaacttcgaggacggcggcgtggtgaccgtgacccaggactcctccctgcaggacggcgagttcatctacaaggtgaagctgcgcggcaccaacttcccctccgacggccccgtaatgcagaagaagaccatgggctgggaggcctcctccgagcggatgtaccccgaggacggcgccctgaagggcgagatcaagcagaggctgaagctgaaggacggcggccactacgacgccgaggtcaagaccacctacaaggccaagaagcccgtgcagctgcccggcgcctacaacgtcaacatcaagctggacatcacctcccacaacgaggactacaccatcgtggaacagtacgagcgcgccgagggccgccactccaccggcggcatggacgagctgtacaagtaa

SEQ ID NO: 8791 - DNA, 2481 bp, Artificial Sequence
  source: /note="Description of Artificial Sequence: Synthetic Construct"
atggtgagcaagggcgccgagctgttcaccggcatcgtgcccatcctgatcgagctgaatggcgatgtgaatggccacaagttcagcgtgagcggcgagggcgagggcgatgccacctacggcaagctgaccctgaagttcatctgcaccaccggcaagctgcctgtgccctggcccaccctggtgaccaccctgagctacggcgtgcagtgcttctcacgctaccccgatcacatgaagcagcacgacttcttcaagagcgccatgcctgagggctacatccaggagcgcaccatcttcttcgaggatgacggcaactacaagtcgcgcgccgaggtgaagttcgagggcgataccctggtgaatcgcatcgagctgaccggcaccgatttcaaggaggatggcaacatcctgggcaataagatggagtacaactacaacgcccacaatgtgtacatcatgaccgacaaggccaagaatggcatcaaggtgaacttcaagatccgccacaacatcgaggatggcagcgtgcagctggccgaccactaccagcagaatacccccatcggcgatggccctgtgctgctgcccgataaccactacctgtccacccagagcgccctgtccaaggaccccaacgagaagcgcgatcacatgatctacttcggcttcgtgaccgccgccgccatcacccacggcatggatgagctgtacaagggatccgaagaaacaagagagctacagtcgttagcggctgctgtggtgccatctgcccagacccttaaaattactgactttagcttcagtgactttgagctgtctgatctggaaacagcactgtgtacaattcggatgtttactgacctcaaccttgtgcagaacttccagatgaaacatgaggttctttgcagatggattttaagtgttaagaagaattatcggaagaatgttgcctatcataattggagacatgcctttaatacagctcagtgcatgtttgctgctctaaaagcaggcaaaattcagaacaagctgactgacctggagatacttgcattgctgattgctgcactaagccacgatttggatcaccgtggtgtgaataactcttacatacagcgaagtgaacatccacttgcccagctttactgccattcaatcatggaacaccatcattttgaccagtgcctgatgattcttaatagtccaggcaatcagattctcagtggcctctccattgaagaatataagaccacgttgaaaataatcaagcaagctattttagctacagacctagcactgtacattaagaggccgggagaatttcaggaacttataagaaaaaatcaattcaatttggaagatcctcatcaaaaggagttgtttttggcaatgctgatgacagcttgtgatctttctgcaattacaaaaccctggcctattcaacaacggatagcagaacttgtagcaactgaattttttgatcaaggagacagagagagaaaagaactcaacatagaacccactgatctaatgaacagggagaagaaaaacaaaatcccaagtatgcaagttgggttcatagatgccatctgcttgcaactgtatgaggccctgacccacgtgtcagaggactgtttccctttgctagatggctgcagaaagaacaggcagaaatggcaggcccttgcagaacagcagggtagtctagatggagctactaacttcagcctgctgaagcaggctggagacgtggaggagaaccctggacctttgagcaagggcgaggaggacaacatggccatcatcaaggagttcatgcgcttcaaggtgcacatggagggctccgtgaacggccacgagttcgagatcgagggcgagggcgagggccgcccctacgagggcacccagaccgccaagctgaaggtgaccaagggcggccccctgcccttcgcctgggacatcctgtcccctcagttcatgtacggctccaaggcctacgtgaagcaccccgccgacatccccgactacttgaagctgtccttccccgagggcttcaagtgggagcgcgtgatgaacttcgaggacggcggcgtggtgaccgtgacccaggactcctccctgcaggacggcgagttcatctacaaggtgaagctgcgcggcaccaacttcccctccgacggccccgtaatgcagaagaagaccatgggctgggaggcctcctccgagcggatgtaccccgaggacggcgccctgaagggcgagatcaagcagaggctgaagctgaaggacggcggccactacgacgccgaggtcaagaccacctacaaggccaagaagcccgtgcagctgcccggcgcctacaacgtcaacatcaagctggacatcacctcccacaacgaggactacaccatcgtggaacagtacgagcgcgccgagggccgccactccaccggcggcatggacgagctgtacaagtaa

SEQ ID NO: 8792 - DNA, 1704 bp, Artificial Sequence
  source: /note="Description of Artificial Sequence: Synthetic Construct"
atggtgagcaagggcgccgagctgttcaccggcatcgtgcccatcctgatcgagctgaatggcgatgtgaatggccacaagttcagcgtgagcggcgagggcgagggcgatgccacctacggcaagctgaccctgaagttcatctgcaccaccggcaagctgcctgtgccctggcccaccctggtgaccaccctgagctacggcgtgcagtgcttctcacgctaccccgatcacatgaagcagcacgacttcttcaagagcgccatgcctgagggctacatccaggagcgcaccatcttcttcgaggatgacggcaactacaagtcgcgcgccgaggtgaagttcgagggcgataccctggtgaatcgcatcgagctgaccggcaccgatttcaaggaggatggcaacatcctgggcaataagatggagtacaactacaacgcccacaatgtgtacatcatgaccgacaaggccaagaatggcatcaaggtgaacttcaagatccgccacaacatcgaggatggcagcgtgcagctggccgaccactaccagcagaatacccccatcggcgatggccctgtgctgctgcccgataaccactacctgtccacccagagcgccctgtccaaggaccccaacgagaagcgcgatcacatgatctacttcggcttcgtgaccgccgccgccatcacccacggcatggatgagctgtacaagggatccgaagaaacaagagagctacagtcgttagcggctgctgtggtgccatctgcccagacccttaaaattactgactttagcttcagtgactttgagctgtctgatctggaaacagcactgtgtacaattcggatgtttactgacctcaaccttgtgcagaacttccagatgaaacatgaggttctttgcagatggattttaagtgttaagaagaattatcggaagaatgttgcctatcataattggagacatgcctttaatacagctcagtgcatgtttgctgctctaaaagcaggcaaaattcagaacaagctgactgacctggagatacttgcattgctgattgctgcactaagccacgatttggatcaccgtggtgtgaataactcttacatacagcgaagtgaacatccacttgcccagctttactgccattcaatcatggaacaccatcattttgaccagtgcctgatgattcttaatagtccaggcaatcagattctcagtggcctctccattgaagaatataagaccacgttgaaaataatcaagcaagctattttagctacagacctagcactgtacattaagagggctggagaatttgcggaacttataagaaaaaatcaattcaatttggaagatcctcatcaaaaggagttgtttttggcaatgctgatgacagcttgtgatctttctgcaattacaaaaccctggcctattcaacaacggatagcagaacttgtagcaactgaattttttgatcaaggagacagagagagaaaagaactcaacatagaacccactgatctaatgaacagggagaagaaaaacaaaatcccaagtatgcaagttgggttcatagatgccatctgcttgcaactgtatgaggccctgacccacgtgtcagaggactgtttccctttgctagatggctgcagaaagaacaggcagaaatggcaggcccttgcagaacagcagtga

SEQ ID NO: 8793 - DNA, 2481 bp, Artificial Sequence
  source: /note="Description of Artificial Sequence: Synthetic Construct"
atggtgagcaagggcgccgagctgttcaccggcatcgtgcccatcctgatcgagctgaatggcgatgtgaatggccacaagttcagcgtgagcggcgagggcgagggcgatgccacctacggcaagctgaccctgaagttcatctgcaccaccggcaagctgcctgtgccctggcccaccctggtgaccaccctgagctacggcgtgcagtgcttctcacgctaccccgatcacatgaagcagcacgacttcttcaagagcgccatgcctgagggctacatccaggagcgcaccatcttcttcgaggatgacggcaactacaagtcgcgcgccgaggtgaagttcgagggcgataccctggtgaatcgcatcgagctgaccggcaccgatttcaaggaggatggcaacatcctgggcaataagatggagtacaactacaacgcccacaatgtgtacatcatgaccgacaaggccaagaatggcatcaaggtgaacttcaagatccgccacaacatcgaggatggcagcgtgcagctggccgaccactaccagcagaatacccccatcggcgatggccctgtgctgctgcccgataaccactacctgtccacccagagcgccctgtccaaggaccccaacgagaagcgcgatcacatgatctacttcggcttcgtgaccgccgccgccatcacccacggcatggatgagctgtacaagggatccgaagaaacaagagagctacagtcgttagcggctgctgtggtgccatctgcccagacccttaaaattactgactttagcttcagtgactttgagctgtctgatctggaaacagcactgtgtacaattcggatgtttactgacctcaaccttgtgcagaacttccagatgaaacatgaggttctttgcagatggattttaagtgttaagaagaattatcggaagaatgttgcctatcataattggagacatgcctttaatacagctcagtgcatgtttgctgctctaaaagcaggcaaaattcagaacaagctgactgacctggagatacttgcattgctgattgctgcactaagccacgatttggatcaccgtggtgtgaataactcttacatacagcgaagtgaacatccacttgcccagctttactgccattcaatcatggaacaccatcattttgaccagtgcctgatgattcttaatagtccaggcaatcagattctcagtggcctctccattgaagaatataagaccacgttgaaaataatcaagcaagctattttagctacagacctagcactgtacattaagaggtctggagaatttggggaacttataagaaaaaatcaattcaatttggaagatcctcatcaaaaggagttgtttttggcaatgctgatgacagcttgtgatctttctgcaattacaaaaccctggcctattcaacaacggatagcagaacttgtagcaactgaattttttgatcaaggagacagagagagaaaagaactcaacatagaacccactgatctaatgaacagggagaagaaaaacaaaatcccaagtatgcaagttgggttcatagatgccatctgcttgcaactgtatgaggccctgacccacgtgtcagaggactgtttccctttgctagatggctgcagaaagaacaggcagaaatggcaggcccttgcagaacagcagggtagtctagatggagctactaacttcagcctgctgaagcaggctggagacgtggaggagaaccctggacctttgagcaagggcgaggaggacaacatggccatcatcaaggagttcatgcgcttcaaggtgcacatggagggctccgtgaacggccacgagttcgagatcgagggcgagggcgagggccgcccctacgagggcacccagaccgccaagctgaaggtgaccaagggcggccccctgcccttcgcctgggacatcctgtcccctcagttcatgtacggctccaaggcctacgtgaagcaccccgccgacatccccgactacttgaagctgtccttccccgagggcttcaagtgggagcgcgtgatgaacttcgaggacggcggcgtggtgaccgtgacccaggactcctccctgcaggacggcgagttcatctacaaggtgaagctgcgcggcaccaacttcccctccgacggccccgtaatgcagaagaagaccatgggctgggaggcctcctccgagcggatgtaccccgaggacggcgccctgaagggcgagatcaagcagaggctgaagctgaaggacggcggccactacgacgccgaggtcaagaccacctacaaggccaagaagcccgtgcagctgcccggcgcctacaacgtcaacatcaagctggacatcacctcccacaacgaggactacaccatcgtggaacagtacgagcgcgccgagggccgccactccaccggcggcatggacgagctgtacaagtaa

SEQ ID NO: 8794 - DNA, 2481 bp, Artificial Sequence
  source: /note="Description of Artificial Sequence: Synthetic Construct"
atggtgagcaagggcgccgagctgttcaccggcatcgtgcccatcctgatcgagctgaatggcgatgtgaatggccacaagttcagcgtgagcggcgagggcgagggcgatgccacctacggcaagctgaccctgaagttcatctgcaccaccggcaagctgcctgtgccctggcccaccctggtgaccaccctgagctacggcgtgcagtgcttctcacgctaccccgatcacatgaagcagcacgacttcttcaagagcgccatgcctgagggctacatccaggagcgcaccatcttcttcgaggatgacggcaactacaagtcgcgcgccgaggtgaagttcgagggcgataccctggtgaatcgcatcgagctgaccggcaccgatttcaaggaggatggcaacatcctgggcaataagatggagtacaactacaacgcccacaatgtgtacatcatgaccgacaaggccaagaatggcatcaaggtgaacttcaagatccgccacaacatcgaggatggcagcgtgcagctggccgaccactaccagcagaatacccccatcggcgatggccctgtgctgctgcccgataaccactacctgtccacccagagcgccctgtccaaggaccccaacgagaagcgcgatcacatgatctacttcggcttcgtgaccgccgccgccatcacccacggcatggatgagctgtacaagggatccgaagaaacaagagagctacagtcgttagcggctgctgtggtgccatctgcccagacccttaaaattactgactttagcttcagtgactttgagctgtctgatctggaaacagcactgtgtacaattcggatgtttactgacctcaaccttgtgcagaacttccagatgaaacatgaggttctttgcagatggattttaagtgttaagaagaattatcggaagaatgttgcctatcataattggagacatgcctttaatacagctcagtgcatgtttgctgctctaaaagcaggcaaaattcagaacaagctgactgacctggagatacttgcattgctgattgctgcactaagccacgatttggatcaccgtggtgtgaataactcttacatacagcgaagtgaacatccacttgcccagctttactgccattcaatcatggaacaccatcattttgaccagtgcctgatgattcttaatagtccaggcaatcagattctcagtggcctctccattgaagaatataagaccacgttgaaaataatcaagcaagctattttagctacagacctagcactgtacattaagaggacgggagaatttccggaacttataagaaaaaatcaattcaatttggaagatcctcatcaaaaggagttgtttttggcaatgctgatgacagcttgtgatctttctgcaattacaaaaccctggcctattcaacaacggatagcagaacttgtagcaactgaattttttgatcaaggagacagagagagaaaagaactcaacatagaacccactgatctaatgaacagggagaagaaaaacaaaatcccaagtatgcaagttgggttcatagatgccatctgcttgcaactgtatgaggccctgacccacgtgtcagaggactgtttccctttgctagatggctgcagaaagaacaggcagaaatggcaggcccttgcagaacagcagggtagtctagatggagctactaacttcagcctgctgaagcaggctggagacgtggaggagaaccctggacctttgagcaagggcgaggaggacaacatggccatcatcaaggagttcatgcgcttcaaggtgcacatggagggctccgtgaacggccacgagttcgagatcgagggcgagggcgagggccgcccctacgagggcacccagaccgccaagctgaaggtgaccaagggcggccccctgcccttcgcctgggacatcctgtcccctcagttcatgtacggctccaaggcctacgtgaagcaccccgccgacatccccgactacttgaagctgtccttccccgagggcttcaagtgggagcgcgtgatgaacttcgaggacggcggcgtggtgaccgtgacccaggactcctccctgcaggacggcgagttcatctacaaggtgaagctgcgcggcaccaacttcccctccgacggccccgtaatgcagaagaagaccatgggctgggaggcctcctccgagcggatgtaccccgaggacggcgccctgaagggcgagatcaagcagaggctgaagctgaaggacggcggccactacgacgccgaggtcaagaccacctacaaggccaagaagcccgtgcagctgcccggcgcctacaacgtcaacatcaagctggacatcacctcccacaacgaggactacaccatcgtggaacagtacgagcgcgccgagggccgccactccaccggcggcatggacgagctgtacaagtaa

SEQ ID NO: 8795 - DNA, 2481 bp, Artificial Sequence
  source: /note="Description of Artificial Sequence: Synthetic Construct"
atggtgagcaagggcgccgagctgttcaccggcatcgtgcccatcctgatcgagctgaatggcgatgtgaatggccacaagttcagcgtgagcggcgagggcgagggcgatgccacctacggcaagctgaccctgaagttcatctgcaccaccggcaagctgcctgtgccctggcccaccctggtgaccaccctgagctacggcgtgcagtgcttctcacgctaccccgatcacatgaagcagcacgacttcttcaagagcgccatgcctgagggctacatccaggagcgcaccatcttcttcgaggatgacggcaactacaagtcgcgcgccgaggtgaagttcgagggcgataccctggtgaatcgcatcgagctgaccggcaccgatttcaaggaggatggcaacatcctgggcaataagatggagtacaactacaacgcccacaatgtgtacatcatgaccgacaaggccaagaatggcatcaaggtgaacttcaagatccgccacaacatcgaggatggcagcgtgcagctggccgaccactaccagcagaatacccccatcggcgatggccctgtgctgctgcccgataaccactacctgtccacccagagcgccctgtccaaggaccccaacgagaagcgcgatcacatgatctacttcggcttcgtgaccgccgccgccatcacccacggcatggatgagctgtacaagggatccgaagaaacaagagagctacagtcgttagcggctgctgtggtgccatctgcccagacccttaaaattactgactttagcttcagtgactttgagctgtctgatctggaaacagcactgtgtacaattcggatgtttactgacctcaaccttgtgcagaacttccagatgaaacatgaggttctttgcagatggattttaagtgttaagaagaattatcggaagaatgttgcctatcataattggagacatgcctttaatacagctcagtgcatgtttgctgctctaaaagcaggcaaaattcagaacaagctgactgacctggagatacttgcattgctgattgctgcactaagccacgatttggatcaccgtggtgtgaataactcttacatacagcgaagtgaacatccacttgcccagctttactgccattcaatcatggaacaccatcattttgaccagtgcctgatgattcttaatagtccaggcaatcagattctcagtggcctctccattgaagaatataagaccacgttgaaaataatcaagcaagctattttagctacagacctagcactgtacattaagaggatgggagaatttcatgaacttataagaaaaaatcaattcaatttggaagatcctcatcaaaaggagttgtttttggcaatgctgatgacagcttgtgatctttctgcaattacaaaaccctggcctattcaacaacggatagcagaacttgtagcaactgaattttttgatcaaggagacagagagagaaaagaactcaacatagaacccactgatctaatgaacagggagaagaaaaacaaaatcccaagtatgcaagttgggttcatagatgccatctgcttgcaactgtatgaggccctgacccacgtgtcagaggactgtttccctttgctagatggctgcagaaagaacaggcagaaatggcaggcccttgcagaacagcagggtagtctagatggagctactaacttcagcctgctgaagcaggctggagacgtggaggagaaccctggacctttgagcaagggcgaggaggacaacatggccatcatcaaggagttcatgcgcttcaaggtgcacatggagggctccgtgaacggccacgagttcgagatcgagggcgagggcgagggccgcccctacgagggcacccagaccgccaagctgaaggtgaccaagggcggccccctgcccttcgcctgggacatcctgtcccctcagttcatgtacggctccaaggcctacgtgaagcaccccgccgacatccccgactacttgaagctgtccttccccgagggcttcaagtgggagcgcgtgatgaacttcgaggacggcggcgtggtgaccgtgacccaggactcctccctgcaggacggcgagttcatctacaaggtgaagctgcgcggcaccaacttcccctccgacggccccgtaatgcagaagaagaccatgggctgggaggcctcctccgagcggatgtaccccgaggacggcgccctgaagggcgagatcaagcagaggctgaagctgaaggacggcggccactacgacgccgaggtcaagaccacctacaaggccaagaagcccgtgcagctgcccggcgcctacaacgtcaacatcaagctggacatcacctcccacaacgaggactacaccatcgtggaacagtacgagcgcgccgagggccgccactccaccggcggcatggacgagctgtacaagtaa

SEQ ID NO: 8796 - DNA, 2481 bp, Artificial Sequence
  source: /note="Description of Artificial Sequence: Synthetic Construct"
atggtgagcaagggcgccgagctgttcaccggcatcgtgcccatcctgatcgagctgaatggcgatgtgaatggccacaagttcagcgtgagcggcgagggcgagggcgatgccacctacggcaagctgaccctgaagttcatctgcaccaccggcaagctgcctgtgccctggcccaccctggtgaccaccctgagctacggcgtgcagtgcttctcacgctaccccgatcacatgaagcagcacgacttcttcaagagcgccatgcctgagggctacatccaggagcgcaccatcttcttcgaggatgacggcaactacaagtcgcgcgccgaggtgaagttcgagggcgataccctggtgaatcgcatcgagctgaccggcaccgatttcaaggaggatggcaacatcctgggcaataagatggagtacaactacaacgcccacaatgtgtacatcatgaccgacaaggccaagaatggcatcaaggtgaacttcaagatccgccacaacatcgaggatggcagcgtgcagctggccgaccactaccagcagaatacccccatcggcgatggccctgtgctgctgcccgataaccactacctgtccacccagagcgccctgtccaaggaccccaacgagaagcgcgatcacatgatctacttcggcttcgtgaccgccgccgccatcacccacggcatggatgagctgtacaagggatccgaagaaacaagagagctacagtcgttagcggctgctgtggtgccatctgcccagacccttaaaattactgactttagcttcagtgactttgagctgtctgatctggaaacagcactgtgtacaattcggatgtttactgacctcaaccttgtgcagaacttccagatgaaacatgaggttctttgcagatggattttaagtgttaagaagaattatcggaagaatgttgcctatcataattggagacatgcctttaatacagctcagtgcatgtttgctgctctaaaagcaggcaaaattcagaacaagctgactgacctggagatacttgcattgctgattgctgcactaagccacgatttggatcaccgtggtgtgaataactcttacatacagcgaagtgaacatccacttgcccagctttactgccattcaatcatggaacaccatcattttgaccagtgcctgatgattcttaatagtccaggcaatcagattctcagtggcctctccattgaagaatataagaccacgttgaaaataatcaagcaagctattttagctacagacctagcactgtacattaagaggtatggagaatttatggaacttataagaaaaaatcaattcaatttggaagatcctcatcaaaaggagttgtttttggcaatgctgatgacagcttgtgatctttctgcaattacaaaaccctggcctattcaacaacggatagcagaacttgtagcaactgaattttttgatcaaggagacagagagagaaaagaactcaacatagaacccactgatctaatgaacagggagaagaaaaacaaaatcccaagtatgcaagttgggttcatagatgccatctgcttgcaactgtatgaggccctgacccacgtgtcagaggactgtttccctttgctagatggctgcagaaagaacaggcagaaatggcaggcccttgcagaacagcagggtagtctagatggagctactaacttcagcctgctgaagcaggctggagacgtggaggagaaccctggacctttgagcaagggcgaggaggacaacatggccatcatcaaggagttcatgcgcttcaaggtgcacatggagggctccgtgaacggccacgagttcgagatcgagggcgagggcgagggccgcccctacgagggcacccagaccgccaagctgaaggtgaccaagggcggccccctgcccttcgcctgggacatcctgtcccctcagttcatgtacggctccaaggcctacgtgaagcaccccgccgacatccccgactacttgaagctgtccttccccgagggcttcaagtgggagcgcgtgatgaacttcgaggacggcggcgtggtgaccgtgacccaggactcctccctgcaggacggcgagttcatctacaaggtgaagctgcgcggcaccaacttcccctccgacggccccgtaatgcagaagaagaccatgggctgggaggcctcctccgagcggatgtaccccgaggacggcgccctgaagggcgagatcaagcagaggctgaagctgaaggacggcggccactacgacgccgaggtcaagaccacctacaaggccaagaagcccgtgcagctgcccggcgcctacaacgtcaacatcaagctggacatcacctcccacaacgaggactacaccatcgtggaacagtacgagcgcgccgagggccgccactccaccggcggcatggacgagctgtacaagtaa

SEQ ID NO: 8797 - DNA, 2481 bp, Artificial Sequence
  source: /note="Description of Artificial Sequence: Synthetic Construct"
atggtgagcaagggcgccgagctgttcaccggcatcgtgcccatcctgatcgagctgaatggcgatgtgaatggccacaagttcagcgtgagcggcgagggcgagggcgatgccacctacggcaagctgaccctgaagttcatctgcaccaccggcaagctgcctgtgccctggcccaccctggtgaccaccctgagctacggcgtgcagtgcttctcacgctaccccgatcacatgaagcagcacgacttcttcaagagcgccatgcctgagggctacatccaggagcgcaccatcttcttcgaggatgacggcaactacaagtcgcgcgccgaggtgaagttcgagggcgataccctggtgaatcgcatcgagctgaccggcaccgatttcaaggaggatggcaacatcctgggcaataagatggagtacaactacaacgcccacaatgtgtacatcatgaccgacaaggccaagaatggcatcaaggtgaacttcaagatccgccacaacatcgaggatggcagcgtgcagctggccgaccactaccagcagaatacccccatcggcgatggccctgtgctgctgcccgataaccactacctgtccacccagagcgccctgtccaaggaccccaacgagaagcgcgatcacatgatctacttcggcttcgtgaccgccgccgccatcacccacggcatggatgagctgtacaagggatccgaagaaacaagagagctacagtcgttagcggctgctgtggtgccatctgcccagacccttaaaattactgactttagcttcagtgactttgagctgtctgatctggaaacagcactgtgtacaattcggatgtttactgacctcaaccttgtgcagaacttccagatgaaacatgaggttctttgcagatggattttaagtgttaagaagaattatcggaagaatgttgcctatcataattggagacatgcctttaatacagctcagtgcatgtttgctgctctaaaagcaggcaaaattcagaacaagctgactgacctggagatacttgcattgctgattgctgcactaagccacgatttggatcaccgtggtgtgaataactcttacatacagcgaagtgaacatccacttgcccagctttactgccattcaatcatggaacaccatcattttgaccagtgcctgatgattcttaatagtccaggcaatcagattctcagtggcctctccattgaagaatataagaccacgttgaaaataatcaagcaagctattttagctacagacctagcactgtacattaagaggcctggagaatttgatgaacttataagaaaaaatcaattcaatttggaagatcctcatcaaaaggagttgtttttggcaatgctgatgacagcttgtgatctttctgcaattacaaaaccctggcctattcaacaacggatagcagaacttgtagcaactgaattttttgatcaaggagacagagagagaaaagaactcaacatagaacccactgatctaatgaacagggagaagaaaaacaaaatcccaagtatgcaagttgggttcatagatgccatctgcttgcaactgtatgaggccctgacccacgtgtcagaggactgtttccctttgctagatggctgcagaaagaacaggcagaaatggcaggcccttgcagaacagcagggtagtctagatggagctactaacttcagcctgctgaagcaggctggagacgtggaggagaaccctggacctttgagcaagggcgaggaggacaacatggccatcatcaaggagttcatgcgcttcaaggtgcacatggagggctccgtgaacggccacgagttcgagatcgagggcgagggcgagggccgcccctacgagggcacccagaccgccaagctgaaggtgaccaagggcggccccctgcccttcgcctgggacatcctgtcccctcagttcatgtacggctccaaggcctacgtgaagcaccccgccgacatccccgactacttgaagctgtccttccccgagggcttcaagtgggagcgcgtgatgaacttcgaggacggcggcgtggtgaccgtgacccaggactcctccctgcaggacggcgagttcatctacaaggtgaagctgcgcggcaccaacttcccctccgacggccccgtaatgcagaagaagaccatgggctgggaggcctcctccgagcggatgtaccccgaggacggcgccctgaagggcgagatcaagcagaggctgaagctgaaggacggcggccactacgacgccgaggtcaagaccacctacaaggccaagaagcccgtgcagctgcccggcgcctacaacgtcaacatcaagctggacatcacctcccacaacgaggactacaccatcgtggaacagtacgagcgcgccgagggccgccactccaccggcggcatggacgagctgtacaagtaa

SEQ ID NO: 8798 - DNA, 1704 bp, Artificial Sequence
  source: /note="Description of Artificial Sequence: Synthetic Construct"
atggtgagcaagggcgccgagctgttcaccggcatcgtgcccatcctgatcgagctgaatggcgatgtgaatggccacaagttcagcgtgagcggcgagggcgagggcgatgccacctacggcaagctgaccctgaagttcatctgcaccaccggcaagctgcctgtgccctggcccaccctggtgaccaccctgagctacggcgtgcagtgcttctcacgctaccccgatcacatgaagcagcacgacttcttcaagagcgccatgcctgagggctacatccaggagcgcaccatcttcttcgaggatgacggcaactacaagtcgcgcgccgaggtgaagttcgagggcgataccctggtgaatcgcatcgagctgaccggcaccgatttcaaggaggatggcaacatcctgggcaataagatggagtacaactacaacgcccacaatgtgtacatcatgaccgacaaggccaagaatggcatcaaggtgaacttcaagatccgccacaacatcgaggatggcagcgtgcagctggccgaccactaccagcagaatacccccatcggcgatggccctgtgctgctgcccgataaccactacctgtccacccagagcgccctgtccaaggaccccaacgagaagcgcgatcacatgatctacttcggcttcgtgaccgccgccgccatcacccacggcatggatgagctgtacaagggatccgaagaaacaagagagctacagtcgttagcggctgctgtggtgccatctgcccagacccttaaaattactgactttagcttcagtgactttgagctgtctgatctggaaacagcactgtgtacaattcggatgtttactgacctcaaccttgtgcagaacttccagatgaaacatgaggttctttgcagatggattttaagtgttaagaagaattatcggaagaatgttgcctatcataattggagacatgcctttaatacagctcagtgcatgtttgctgctctaaaagcaggcaaaattcagaacaagctgactgacctggagatacttgcattgctgattgctgcactaagccacgatttggatcaccgtggtgtgaataactcttacatacagcgaagtgaacatccacttgcccagctttactgccattcaatcatggaacaccatcattttgaccagtgcctgatgattcttaatagtccaggcaatcagattctcagtggcctctccattgaagaatataagaccacgttgaaaataatcaagcaagctattttagctacagacctagcactgtacattaagaggcctggagaatttggggaacttataagaaaaaatcaattcaatttggaagatcctcatcaaaaggagttgtttttggcaatgctgatgacagcttgtgatctttctgcaattacaaaaccctggcctattcaacaacggatagcagaacttgtagcaactgaattttttgatcaaggagacagagagagaaaagaactcaacatagaacccactgatctaatgaacagggagaagaaaaacaaaatcccaagtatgcaagttgggttcatagatgccatctgcttgcaactgtatgaggccctgacccacgtgtcagaggactgtttccctttgctagatggctgcagaaagaacaggcagaaatggcaggcccttgcagaacagcagtga

SEQ ID NO: 8799 - DNA, 2481 bp, Artificial Sequence
  source: /note="Description of Artificial Sequence: Synthetic Construct"
atggtgagcaagggcgccgagctgttcaccggcatcgtgcccatcctgatcgagctgaatggcgatgtgaatggccacaagttcagcgtgagcggcgagggcgagggcgatgccacctacggcaagctgaccctgaagttcatctgcaccaccggcaagctgcctgtgccctggcccaccctggtgaccaccctgagctacggcgtgcagtgcttctcacgctaccccgatcacatgaagcagcacgacttcttcaagagcgccatgcctgagggctacatccaggagcgcaccatcttcttcgaggatgacggcaactacaagtcgcgcgccgaggtgaagttcgagggcgataccctggtgaatcgcatcgagctgaccggcaccgatttcaaggaggatggcaacatcctgggcaataagatggagtacaactacaacgcccacaatgtgtacatcatgaccgacaaggccaagaatggcatcaaggtgaacttcaagatccgccacaacatcgaggatggcagcgtgcagctggccgaccactaccagcagaatacccccatcggcgatggccctgtgctgctgcccgataaccactacctgtccacccagagcgccctgtccaaggaccccaacgagaagcgcgatcacatgatctacttcggcttcgtgaccgccgccgccatcacccacggcatggatgagctgtacaagggatccgaagaaacaagagagctacagtcgttagcggctgctgtggtgccatctgcccagacccttaaaattactgactttagcttcagtgactttgagctgtctgatctggaaacagcactgtgtacaattcggatgtttactgacctcaaccttgtgcagaacttccagatgaaacatgaggttctttgcagatggattttaagtgttaagaagaattatcggaagaatgttgcctatcataattggagacatgcctttaatacagctcagtgcatgtttgctgctctaaaagcaggcaaaattcagaacaagctgactgacctggagatacttgcattgctgattgctgcactaagccacgatttggatcaccgtggtgtgaataactcttacatacagcgaagtgaacatccacttgcccagctttactgccattcaatcatggaacaccatcattttgaccagtgcctgatgattcttaatagtccaggcaatcagattctcagtggcctctccattgaagaatataagaccacgttgaaaataatcaagcaagctattttagctacagacctagcactgtacattaagaggtggggagaatttttggaacttataagaaaaaatcaattcaatttggaagatcctcatcaaaaggagttgtttttggcaatgctgatgacagcttgtgatctttctgcaattacaaaaccctggcctattcaacaacggatagcagaacttgtagcaactgaattttttgatcaaggagacagagagagaaaagaactcaacatagaacccactgatctaatgaacagggagaagaaaaacaaaatcccaagtatgcaagttgggttcatagatgccatctgcttgcaactgtatgaggccctgacccacgtgtcagaggactgtttccctttgctagatggctgcagaaagaacaggcagaaatggcaggcccttgcagaacagcagggtagtctagatggagctactaacttcagcctgctgaagcaggctggagacgtggaggagaaccctggacctttgagcaagggcgaggaggacaacatggccatcatcaaggagttcatgcgcttcaaggtgcacatggagggctccgtgaacggccacgagttcgagatcgagggcgagggcgagggccgcccctacgagggcacccagaccgccaagctgaaggtgaccaagggcggccccctgcccttcgcctgggacatcctgtcccctcagttcatgtacggctccaaggcctacgtgaagcaccccgccgacatccccgactacttgaagctgtccttccccgagggcttcaagtgggagcgcgtgatgaacttcgaggacggcggcgtggtgaccgtgacccaggactcctccctgcaggacggcgagttcatctacaaggtgaagctgcgcggcaccaacttcccctccgacggccccgtaatgcagaagaagaccatgggctgggaggcctcctccgagcggatgtaccccgaggacggcgccctgaagggcgagatcaagcagaggctgaagctgaaggacggcggccactacgacgccgaggtcaagaccacctacaaggccaagaagcccgtgcagctgcccggcgcctacaacgtcaacatcaagctggacatcacctcccacaacgaggactacaccatcgtggaacagtacgagcgcgccgagggccgccactccaccggcggcatggacgagctgtacaagtaa

SEQ ID NO: 8800 - DNA, 1704 bp, Artificial Sequence
  source: /note="Description of Artificial Sequence: Synthetic Construct"
atggtgagcaagggcgccgagctgttcaccggcatcgtgcccatcctgatcgagctgaatggcgatgtgaatggccacaagttcagcgtgagcggcgagggcgagggcgatgccacctacggcaagctgaccctgaagttcatctgcaccaccggcaagctgcctgtgccctggcccaccctggtgaccaccctgagctacggcgtgcagtgcttctcacgctaccccgatcacatgaagcagcacgacttcttcaagagcgccatgcctgagggctacatccaggagcgcaccatcttcttcgaggatgacggcaactacaagtcgcgcgccgaggtgaagttcgagggcgataccctggtgaatcgcatcgagctgaccggcaccgatttcaaggaggatggcaacatcctgggcaataagatggagtacaactacaacgcccacaatgtgtacatcatgaccgacaaggccaagaatggcatcaaggtgaacttcaagatccgccacaacatcgaggatggcagcgtgcagctggccgaccactaccagcagaatacccccatcggcgatggccctgtgctgctgcccgataaccactacctgtccacccagagcgccctgtccaaggaccccaacgagaagcgcgatcacatgatctacttcggcttcgtgaccgccgccgccatcacccacggcatggatgagctgtacaagggatccgaagaaacaagagagctacagtcgttagcggctgctgtggtgccatctgcccagacccttaaaattactgactttagcttcagtgactttgagctgtctgatctggaaacagcactgtgtacaattcggatgtttactgacctcaaccttgtgcagaacttccagatgaaacatgaggttctttgcagatggattttaagtgttaagaagaattatcggaagaatgttgcctatcataattggagacatgcctttaatacagctcagtgcatgtttgctgctctaaaagcaggcaaaattcagaacaagctgactgacctggagatacttgcattgctgattgctgcactaagccacgatttggatcaccgtggtgtgaataactcttacatacagcgaagtgaacatccacttgcccagctttactgccattcaatcatggaacaccatcattttgaccagtgcctgatgattcttaatagtccaggcaatcagattctcagtggcctctccattgaagaatataagaccacgttgaaaataatcaagcaagctattttagctacagacctagcactgtacattaagaggttgggagaatttagtgaacttataagaaaaaatcaattcaatttggaagatcctcatcaaaaggagttgtttttggcaatgctgatgacagcttgtgatctttctgcaattacaaaaccctggcctattcaacaacggatagcagaacttgtagcaactgaattttttgatcaaggagacagagagagaaaagaactcaacatagaacccactgatctaatgaacagggagaagaaaaacaaaatcccaagtatgcaagttgggttcatagatgccatctgcttgcaactgtatgaggccctgacccacgtgtcagaggactgtttccctttgctagatggctgcagaaagaacaggcagaaatggcaggcccttgcagaacagcagtga

SEQ ID NO: 8801 - DNA, 2481 bp, Artificial Sequence
  source: /note="Description of Artificial Sequence: Synthetic Construct"
atggtgagcaagggcgccgagctgttcaccggcatcgtgcccatcctgatcgagctgaatggcgatgtgaatggccacaagttcagcgtgagcggcgagggcgagggcgatgccacctacggcaagctgaccctgaagttcatctgcaccaccggcaagctgcctgtgccctggcccaccctggtgaccaccctgagctacggcgtgcagtgcttctcacgctaccccgatcacatgaagcagcacgacttcttcaagagcgccatgcctgagggctacatccaggagcgcaccatcttcttcgaggatgacggcaactacaagtcgcgcgccgaggtgaagttcgagggcgataccctggtgaatcgcatcgagctgaccggcaccgatttcaaggaggatggcaacatcctgggcaataagatggagtacaactacaacgcccacaatgtgtacatcatgaccgacaaggccaagaatggcatcaaggtgaacttcaagatccgccacaacatcgaggatggcagcgtgcagctggccgaccactaccagcagaatacccccatcggcgatggccctgtgctgctgcccgataaccactacctgtccacccagagcgccctgtccaaggaccccaacgagaagcgcgatcacatgatctacttcggcttcgtgaccgccgccgccatcacccacggcatggatgagctgtacaagggatccgaagaaacaagagagctacagtcgttagcggctgctgtggtgccatctgcccagacccttaaaattactgactttagcttcagtgactttgagctgtctgatctggaaacagcactgtgtacaattcggatgtttactgacctcaaccttgtgcagaacttccagatgaaacatgaggttctttgcagatggattttaagtgttaagaagaattatcggaagaatgttgcctatcataattggagacatgcctttaatacagctcagtgcatgtttgctgctctaaaagcaggcaaaattcagaacaagctgactgacctggagatacttgcattgctgattgctgcactaagccacgatttggatcaccgtggtgtgaataactcttacatacagcgaagtgaacatccacttgcccagctttactgccattcaatcatggaacaccatcattttgaccagtgcctgatgattcttaatagtccaggcaatcagattctcagtggcctctccattgaagaatataagaccacgttgaaaataatcaagcaagctattttagctacagacctagcactgtacattaagagggatggagaatttacggaacttataagaaaaaatcaattcaatttggaagatcctcatcaaaaggagttgtttttggcaatgctgatgacagcttgtgatctttctgcaattacaaaaccctggcctattcaacaacggatagcagaacttgtagcaactgaattttttgatcaaggagacagagagagaaaagaactcaacatagaacccactgatctaatgaacagggagaagaaaaacaaaatcccaagtatgcaagttgggttcatagatgccatctgcttgcaactgtatgaggccctgacccacgtgtcagaggactgtttccctttgctagatggctgcagaaagaacaggcagaaatggcaggcccttgcagaacagcagggtagtctagatggagctactaacttcagcctgctgaagcaggctggagacgtggaggagaaccctggacctttgagcaagggcgaggaggacaacatggccatcatcaaggagttcatgcgcttcaaggtgcacatggagggctccgtgaacggccacgagttcgagatcgagggcgagggcgagggccgcccctacgagggcacccagaccgccaagctgaaggtgaccaagggcggccccctgcccttcgcctgggacatcctgtcccctcagttcatgtacggctccaaggcctacgtgaagcaccccgccgacatccccgactacttgaagctgtccttccccgagggcttcaagtgggagcgcgtgatgaacttcgaggacggcggcgtggtgaccgtgacccaggactcctccctgcaggacggcgagttcatctacaaggtgaagctgcgcggcaccaacttcccctccgacggccccgtaatgcagaagaagaccatgggctgggaggcctcctccgagcggatgtaccccgaggacggcgccctgaagggcgagatcaagcagaggctgaagctgaaggacggcggccactacgacgccgaggtcaagaccacctacaaggccaagaagcccgtgcagctgcccggcgcctacaacgtcaacatcaagctggacatcacctcccacaacgaggactacaccatcgtggaacagtacgagcgcgccgagggccgccactccaccggcggcatggacgagctgtacaagtaa

SEQ ID NO: 8802 - DNA, 1704 bp, Artificial Sequence
  source: /note="Description of Artificial Sequence: Synthetic Construct"
atggtgagcaagggcgccgagctgttcaccggcatcgtgcccatcctgatcgagctgaatggcgatgtgaatggccacaagttcagcgtgagcggcgagggcgagggcgatgccacctacggcaagctgaccctgaagttcatctgcaccaccggcaagctgcctgtgccctggcccaccctggtgaccaccctgagctacggcgtgcagtgcttctcacgctaccccgatcacatgaagcagcacgacttcttcaagagcgccatgcctgagggctacatccaggagcgcaccatcttcttcgaggatgacggcaactacaagtcgcgcgccgaggtgaagttcgagggcgataccctggtgaatcgcatcgagctgaccggcaccgatttcaaggaggatggcaacatcctgggcaataagatggagtacaactacaacgcccacaatgtgtacatcatgaccgacaaggccaagaatggcatcaaggtgaacttcaagatccgccacaacatcgaggatggcagcgtgcagctggccgaccactaccagcagaatacccccatcggcgatggccctgtgctgctgcccgataaccactacctgtccacccagagcgccctgtccaaggaccccaacgagaagcgcgatcacatgatctacttcggcttcgtgaccgccgccgccatcacccacggcatggatgagctgtacaagggatccgaagaaacaagagagctacagtcgttagcggctgctgtggtgccatctgcccagacccttaaaattactgactttagcttcagtgactttgagctgtctgatctggaaacagcactgtgtacaattcggatgtttactgacctcaaccttgtgcagaacttccagatgaaacatgaggttctttgcagatggattttaagtgttaagaagaattatcggaagaatgttgcctatcataattggagacatgcctttaatacagctcagtgcatgtttgctgctctaaaagcaggcaaaattcagaacaagctgactgacctggagatacttgcattgctgattgctgcactaagccacgatttggatcaccgtggtgtgaataactcttacatacagcgaagtgaacatccacttgcccagctttactgccattcaatcatggaacaccatcattttgaccagtgcctgatgattcttaatagtccaggcaatcagattctcagtggcctctccattgaagaatataagaccacgttgaaaataatcaagcaagctattttagctacagacctagcactgtacattaagaggttgggagaatttgttgaacttataagaaaaaatcaattcaatttggaagatcctcatcaaaaggagttgtttttggcaatgctgatgacagcttgtgatctttctgcaattacaaaaccctggcctattcaacaacggatagcagaacttgtagcaactgaattttttgatcaaggagacagagagagaaaagaactcaacatagaacccactgatctaatgaacagggagaagaaaaacaaaatcccaagtatgcaagttgggttcatagatgccatctgcttgcaactgtatgaggccctgacccacgtgtcagaggactgtttccctttgctagatggctgcagaaagaacaggcagaaatggcaggcccttgcagaacagcagtga

SEQ ID NO: 8803 - DNA, 2481 bp, Artificial Sequence
  source: /note="Description of Artificial Sequence: Synthetic Construct"
atggtgagcaagggcgccgagctgttcaccggcatcgtgcccatcctgatcgagctgaatggcgatgtgaatggccacaagttcagcgtgagcggcgagggcgagggcgatgccacctacggcaagctgaccctgaagttcatctgcaccaccggcaagctgcctgtgccctggcccaccctggtgaccaccctgagctacggcgtgcagtgcttctcacgctaccccgatcacatgaagcagcacgacttcttcaagagcgccatgcctgagggctacatccaggagcgcaccatcttcttcgaggatgacggcaactacaagtcgcgcgccgaggtgaagttcgagggcgataccctggtgaatcgcatcgagctgaccggcaccgatttcaaggaggatggcaacatcctgggcaataagatggagtacaactacaacgcccacaatgtgtacatcatgaccgacaaggccaagaatggcatcaaggtgaacttcaagatccgccacaacatcgaggatggcagcgtgcagctggccgaccactaccagcagaatacccccatcggcgatggccctgtgctgctgcccgataaccactacctgtccacccagagcgccctgtccaaggaccccaacgagaagcgcgatcacatgatctacttcggcttcgtgaccgccgccgccatcacccacggcatggatgagctgtacaagggatccgaagaaacaagagagctacagtcgttagcggctgctgtggtgccatctgcccagacccttaaaattactgactttagcttcagtgactttgagctgtctgatctggaaacagcactgtgtacaattcggatgtttactgacctcaaccttgtgcagaacttccagatgaaacatgaggttctttgcagatggattttaagtgttaagaagaattatcggaagaatgttgcctatcataattggagacatgcctttaatacagctcagtgcatgtttgctgctctaaaagcaggcaaaattcagaacaagctgactgacctggagatacttgcattgctgattgctgcactaagccacgatttggatcaccgtggtgtgaataactcttacatacagcgaagtgaacatccacttgcccagctttactgccattcaatcatggaacaccatcattttgaccagtgcctgatgattcttaatagtccaggcaatcagattctcagtggcctctccattgaagaatataagaccacgttgaaaataatcaagcaagctattttagctacagacctagcactgtacattaagagggggggagaatttgttgaacttataagaaaaaatcaattcaatttggaagatcctcatcaaaaggagttgtttttggcaatgctgatgacagcttgtgatctttctgcaattacaaaaccctggcctattcaacaacggatagcagaacttgtagcaactgaattttttgatcaaggagacagagagagaaaagaactcaacatagaacccactgatctaatgaacagggagaagaaaaacaaaatcccaagtatgcaagttgggttcatagatgccatctgcttgcaactgtatgaggccctgacccacgtgtcagaggactgtttccctttgctagatggctgcagaaagaacaggcagaaatggcaggcccttgcagaacagcagggtagtctagatggagctactaacttcagcctgctgaagcaggctggagacgtggaggagaaccctggacctttgagcaagggcgaggaggacaacatggccatcatcaaggagttcatgcgcttcaaggtgcacatggagggctccgtgaacggccacgagttcgagatcgagggcgagggcgagggccgcccctacgagggcacccagaccgccaagctgaaggtgaccaagggcggccccctgcccttcgcctgggacatcctgtcccctcagttcatgtacggctccaaggcctacgtgaagcaccccgccgacatccccgactacttgaagctgtccttccccgagggcttcaagtgggagcgcgtgatgaacttcgaggacggcggcgtggtgaccgtgacccaggactcctccctgcaggacggcgagttcatctacaaggtgaagctgcgcggcaccaacttcccctccgacggccccgtaatgcagaagaagaccatgggctgggaggcctcctccgagcggatgtaccccgaggacggcgccctgaagggcgagatcaagcagaggctgaagctgaaggacggcggccactacgacgccgaggtcaagaccacctacaaggccaagaagcccgtgcagctgcccggcgcctacaacgtcaacatcaagctggacatcacctcccacaacgaggactacaccatcgtggaacagtacgagcgcgccgagggccgccactccaccggcggcatggacgagctgtacaagtaa

SEQ ID NO: 8804 - DNA, 2481 bp, Artificial Sequence
  source: /note="Description of Artificial Sequence: Synthetic Construct"
atggtgagcaagggcgccgagctgttcaccggcatcgtgcccatcctgatcgagctgaatggcgatgtgaatggccacaagttcagcgtgagcggcgagggcgagggcgatgccacctacggcaagctgaccctgaagttcatctgcaccaccggcaagctgcctgtgccctggcccaccctggtgaccaccctgagctacggcgtgcagtgcttctcacgctaccccgatcacatgaagcagcacgacttcttcaagagcgccatgcctgagggctacatccaggagcgcaccatcttcttcgaggatgacggcaactacaagtcgcgcgccgaggtgaagttcgagggcgataccctggtgaatcgcatcgagctgaccggcaccgatttcaaggaggatggcaacatcctgggcaataagatggagtacaactacaacgcccacaatgtgtacatcatgaccgacaaggccaagaatggcatcaaggtgaacttcaagatccgccacaacatcgaggatggcagcgtgcagctggccgaccactaccagcagaatacccccatcggcgatggccctgtgctgctgcccgataaccactacctgtccacccagagcgccctgtccaaggaccccaacgagaagcgcgatcacatgatctacttcggcttcgtgaccgccgccgccatcacccacggcatggatgagctgtacaagggatccgaagaaacaagagagctacagtcgttagcggctgctgtggtgccatctgcccagacccttaaaattactgactttagcttcagtgactttgagctgtctgatctggaaacagcactgtgtacaattcggatgtttactgacctcaaccttgtgcagaacttccagatgaaacatgaggttctttgcagatggattttaagtgttaagaagaattatcggaagaatgttgcctatcataattggagacatgcctttaatacagctcagtgcatgtttgctgctctaaaagcaggcaaaattcagaacaagctgactgacctggagatacttgcattgctgattgctgcactaagccacgatttggatcaccgtggtgtgaataactcttacatacagcgaagtgaacatccacttgcccagctttactgccattcaatcatggaacaccatcattttgaccagtgcctgatgattcttaatagtccaggcaatcagattctcagtggcctctccattgaagaatataagaccacgttgaaaataatcaagcaagctattttagctacagacctagcactgtacattaagaggtggggagaatttgctgaacttataagaaaaaatcaattcaatttggaagatcctcatcaaaaggagttgtttttggcaatgctgatgacagcttgtgatctttctgcaattacaaaaccctggcctattcaacaacggatagcagaacttgtagcaactgaattttttgatcaaggagacagagagagaaaagaactcaacatagaacccactgatctaatgaacagggagaagaaaaacaaaatcccaagtatgcaagttgggttcatagatgccatctgcttgcaactgtatgaggccctgacccacgtgtcagaggactgtttccctttgctagatggctgcagaaagaacaggcagaaatggcaggcccttgcagaacagcagggtagtctagatggagctactaacttcagcctgctgaagcaggctggagacgtggaggagaaccctggacctttgagcaagggcgaggaggacaacatggccatcatcaaggagttcatgcgcttcaaggtgcacatggagggctccgtgaacggccacgagttcgagatcgagggcgagggcgagggccgcccctacgagggcacccagaccgccaagctgaaggtgaccaagggcggccccctgcccttcgcctgggacatcctgtcccctcagttcatgtacggctccaaggcctacgtgaagcaccccgccgacatccccgactacttgaagctgtccttccccgagggcttcaagtgggagcgcgtgatgaacttcgaggacggcggcgtggtgaccgtgacccaggactcctccctgcaggacggcgagttcatctacaaggtgaagctgcgcggcaccaacttcccctccgacggccccgtaatgcagaagaagaccatgggctgggaggcctcctccgagcggatgtaccccgaggacggcgccctgaagggcgagatcaagcagaggctgaagctgaaggacggcggccactacgacgccgaggtcaagaccacctacaaggccaagaagcccgtgcagctgcccggcgcctacaacgtcaacatcaagctggacatcacctcccacaacgaggactacaccatcgtggaacagtacgagcgcgccgagggccgccactccaccggcggcatggacgagctgtacaagtaa

SEQ ID NO: 8805 - protein, 326 aa, Artificial Sequence
  source: /note="Description of Artificial Sequence: Synthetic Destabilizing Domain (DD)"
EETRELQSLAAAVVPSAQTLKITDFSFSDFELSDLETALNTIRMFTDLNLVQNFQMKHEVLCRWILSVKKNYRKNVAYHNWRHAFNTAQCMFAALKAGKIQNKLTDLEILALLIAALSHDLDHRGVNNSYIQRSEHPLAQLYCHSIMEHHHFDQCLMILNSPGNQILSGLSIEEYKTTLKIIKQAILATDLALYIKRRGEFFELIRKNQFNLEDPHQKELFLAMLMTACDLSAITKPWPIQQRIAELVATEFFDQGDRERKELNIEPTDLMNREKKNKIPSMQVGFIDAICLQLYEALTHVSEDCFPLLDGCRKNRQKWQALAEQQ

SEQ ID NO: 8806 - protein, 326 aa, Artificial Sequence
  source: /note="Description of Artificial Sequence: Synthetic Destabilizing Domain (DD)"
EKTRELQSLAAAVVPSAQTLKITDFSFSDFELSDLETALCTIRMFTDLNLVQNFQMKHEVLCRWILSVKKNYRKNVAYHNWRHAFNTAQCMFAALKAGKIQNKLTDLEILALLIAALSHDLDHRGVNNSYIQRSEHPLAQLYCHSIMEHHHFDQCLMILNSPGNQILSGLSIEEYKTTLKIIKQAILATDLALYIKRRGEFFELWRKNQFNLEDPHQKELFLAMLMTACDLSAITKPWPIQQRIAELVATEFFDQGDRERKELNIEPTDLMNREKKNKIPSMQVGFIDAICLQLYEALTHVSEDCFPLLDGCRKNRQKWQALAEQQ

SEQ ID NO: 8807 - protein, 326 aa, Artificial Sequence
  source: /note="Description of Artificial Sequence: Synthetic Destabilizing Domain (DD)"
EETRELQSLAAAVVPSAQTLKITDFSFSDFELSDLETALCTIRMFTDLNLVQNFQMKHEVLCRWILSVKKNYRKNVAYHNWRHAFNTAQCMFAALKAGKIQNKLTDLEILALLIAALSHDLDHRGVNNSYIQRSEHPLAQLYCFSIMEHHHFDQCLMILNSPGNQILFGLSIEEYKTTLKIIKQAILATDLALYIKRRGEFFELIRKNQFNLEDPHQKELFLAMLMTACDLSAITKPWPIQQRIAELVATEFFDQGDRERKELNIEPTDLMNREKKNKIPSMQVGFIDAICLQLYEALTHVSEDCFPLLDGCRKNRQKWQALAEQQ

SEQ ID NO: 8808 - protein, 4 aa, Artificial Sequence
  source: /note="Description of Artificial Sequence: Synthetic Linker"
SLDG

SEQ ID NO: 8809 - protein, 19 aa, Artificial Sequence
  source: /note="Description of Artificial Sequence: Synthetic Cleavage site"
ATNFSLLKQAGDVEENPGP

SEQ ID NO: 8810 - protein, 825 aa, Artificial Sequence
  source: /note="Description of Artificial Sequence: Synthetic Construct"
MVSKGAELFTGIVPILIELNGDVNGHKFSVSGEGEGDATYGKLTLKFICTTGKLPVPWPTLVTTLSYGVQCFSRYPDHMKQHDFFKSAMPEGYIQERTIFFEDDGNYKSRAEVKFEGDTLVNRIELTGTDFKEDGNILGNKMEYNYNAHNVYIMTDKAKNGIKVNFKIRHNIEDGSVQLADHYQQNTPIGDGPVLLPDNHYLSTQSALSKDPNEKRDHMIYFGFVTAAAITHGMDELYKGSEETRELQSLAAAVVPSAQTLKITDFSFSDFELSDLETALNTIRMFTDLNLVQNFQMKHEVLCRWILSVKKNYRKNVAYHNWRHAFNTAQCMFAALKAGKIQNKLTDLEILALLIAALSHDLDHRGVNNSYIQRSEHPLAQLYCHSIMEHHHFDQCLMILNSPGNQILSGLSIEEYKTTLKIIKQAILATDLALYIKRRGEFFELIRKNQFNLEDPHQKELFLAMLMTACDLSAITKPWPIQQRIAELVATEFFDQGDRERKELNIEPTDLMNREKKNKIPSMQVGFIDAICLQLYEALTHVSEDCFPLLDGCRKNRQKWQALAEQQSLDGATNFSLLKQAGDVEENPGPLSKGEEDNMAIIKEFMRFKVHMEGSVNGHEFEIEGEGEGRPYEGTQTAKLKVTKGGPLPFAWDILSPQFMYGSKAYVKHPADIPDYLKLSFPEGFKWERVMNFEDGGVVTVTQDSSLQDGEFIYKVKLRGTNFPSDGPVMQKKTMGWEASSERMYPEDGALKGEIKQRLKLKDGGHYDAEVKTTYKAKKPVQLPGAYNVNIKLDITSHNEDYTIVEQYERAEGRHSTGGMDELYK

SEQ ID NO: 8811 - protein, 825 aa, Artificial Sequence
  source: /note="Description of Artificial Sequence: Synthetic Construct"
MVSKGAELFTGIVPILIELNGDVNGHKFSVSGEGEGDATYGKLTLKFICTTGKLPVPWPTLVTTLSYGVQCFSRYPDHMKQHDFFKSAMPEGYIQERTIFFEDDGNYKSRAEVKFEGDTLVNRIELTGTDFKEDGNILGNKMEYNYNAHNVYIMTDKAKNGIKVNFKIRHNIEDGSVQLADHYQQNTPIGDGPVLLPDNHYLSTQSALSKDPNEKRDHMIYFGFVTAAAITHGMDELYKGSEKTRELQSLAAAVVPSAQTLKITDFSFSDFELSDLETALCTIRMFTDLNLVQNFQMKHEVLCRWILSVKKNYRKNVAYHNWRHAFNTAQCMFAALKAGKIQNKLTDLEILALLIAALSHDLDHRGVNNSYIQRSEHPLAQLYCHSIMEHHHFDQCLMILNSPGNQILSGLSIEEYKTTLKIIKQAILATDLALYIKRRGEFFELWRKNQFNLEDPHQKELFLAMLMTACDLSAITKPWPIQQRIAELVATEFFDQGDRERKELNIEPTDLMNREKKNKIPSMQVGFIDAICLQLYEALTHVSEDCFPLLDGCRKNRQKWQALAEQQSLDGATNFSLLKQAGDVEENPGPLSKGEEDNMAIIKEFMRFKVHMEGSVNGHEFEIEGEGEGRPYEGTQTAKLKVTKGGPLPFAWDILSPQFMYGSKAYVKHPADIPDYLKLSFPEGFKWERVMNFEDGGVVTVTQDSSLQDGEFIYKVKLRGTNFPSDGPVMQKKTMGWEASSERMYPEDGALKGEIKQRLKLKDGGHYDAEVKTTYKAKKPVQLPGAYNVNIKLDITSHNEDYTIVEQYERAEGRHSTGGMDELYK

SEQ ID NO: 8812 - protein, 825 aa, Artificial Sequence
  source: /note="Description of Artificial Sequence: Synthetic Construct"
MVSKGAELFTGIVPILIELNGDVNGHKFSVSGEGEGDATYGKLTLKFICTTGKLPVPWPTLVTTLSYGVQCFSRYPDHMKQHDFFKSAMPEGYIQERTIFFEDDGNYKSRAEVKFEGDTLVNRIELTGTDFKEDGNILGNKMEYNYNAHNVYIMTDKAKNGIKVNFKIRHNIEDGSVQLADHYQQNTPIGDGPVLLPDNHYLSTQSALSKDPNEKRDHMIYFGFVTAAAITHGMDELYKGSEETRELQSLAAAVVPSAQTLKITDFSFSDFELSDLETALCTIRMFTDLNLVQNFQMKHEVLCRWILSVKKNYRKNVAYHNWRHAFNTAQCMFAALKAGKIQNKLTDLEILALLIAALSHDLDHRGVNNSYIQRSEHPLAQLYCFSIMEHHHFDQCLMILNSPGNQILFGLSIEEYKTTLKIIKQAILATDLALYIKRRGEFFELIRKNQFNLEDPHQKELFLAMLMTACDLSAITKPWPIQQRIAELVATEFFDQGDRERKELNIEPTDLMNREKKNKIPSMQVGFIDAICLQLYEALTHVSEDCFPLLDGCRKNRQKWQALAEQQSLDGATNFSLLKQAGDVEENPGPLSKGEEDNMAIIKEFMRFKVHMEGSVNGHEFEIEGEGEGRPYEGTQTAKLKVTKGGPLPFAWDILSPQFMYGSKAYVKHPADIPDYLKLSFPEGFKWERVMNFEDGGVVTVTQDSSLQDGEFIYKVKLRGTNFPSDGPVMQKKTMGWEASSERMYPEDGALKGEIKQRLKLKDGGHYDAEVKTTYKAKKPVQLPGAYNVNIKLDITSHNEDYTIVEQYERAEGRHSTGGMDELYK

SEQ ID NO: 8813 - DNA, 978 bp, Artificial Sequence
  source: /note="Description of Artificial Sequence: Synthetic Destabilizing Domain (DD)"
gaagaaacaagagagctacagtcgttagcggctgctgtggtgccatctgcccagacccttaaaattactgactttagcttcagtgactttgagctgtctgatctggaaacagcactgaatacaattcggatgtttactgacctcaaccttgtgcagaacttccagatgaaacatgaggttctttgcagatggattttaagtgttaagaagaattatcggaagaatgttgcctatcataattggagacatgcctttaatacagctcagtgcatgtttgctgctctaaaagcaggcaaaattcagaacaagctgactgacctggagatacttgcattgctgattgctgcactaagccacgatttggatcaccgtggtgtgaataactcttacatacagcgaagtgaacatccacttgcccagctttactgccattcaatcatggaacaccatcattttgaccagtgcctgatgattcttaatagtccaggcaatcagattctcagtggcctctccattgaagaatataagaccacgttgaaaataatcaagcaagctattttagctacagacctagcactgtacattaagaggcgaggagaattttttgaacttataagaaaaaatcaattcaatttggaagatcctcatcaaaaggagttgtttttggcaatgctgatgacagcttgtgatctttctgcaattacaaaaccctggcctattcaacaacggatagcagaacttgtagcaactgaattttttgatcaaggagacagagagagaaaagaactcaacatagaacccactgatctaatgaacagggagaagaaaaacaaaatcccaagtatgcaagttgggttcatagatgccatctgcttgcaactgtatgaggccctgacccacgtgtcagaggactgtttccctttgctagatggctgcagaaagaacaggcagaaatggcaggcccttgcagaacagcag

SEQ ID NO: 8814 - DNA, 978 bp, Artificial Sequence
  source: /note="Description of Artificial Sequence: Synthetic Destabilizing Domain (DD)"
gaaaaaacaagagagctacagtcgttagcggctgctgtggtgccatctgcccagacccttaaaattactgactttagcttcagtgactttgagctgtctgatctggaaacagcactgtgtacaattcggatgtttactgacctcaaccttgtgcagaacttccagatgaaacatgaggttctttgcagatggattttaagtgttaagaagaattatcggaagaatgttgcctatcataattggagacatgcctttaatacagctcagtgcatgtttgctgctctaaaagcaggcaaaattcagaacaagctgactgacctggagatacttgcattgctgattgctgcactaagccacgatttggatcaccgtggtgtgaataactcttacatacagcgaagtgaacatccacttgcccagctttactgccattcaatcatggaacaccatcattttgaccagtgcctgatgattcttaatagtccaggcaatcagattctcagtggcctctccattgaagaatataagaccacgttgaaaataatcaagcaagctattttagctacagacctagcactgtacattaagaggcgaggagaattttttgaactttggagaaaaaatcaattcaatttggaagatcctcatcaaaaggagttgtttttggcaatgctgatgacagcttgtgatctttctgcaattacaaaaccctggcctattcaacaacggatagcagaacttgtagcaactgaattttttgatcaaggagacagagagagaaaagaactcaacatagaacccactgatctaatgaacagggagaagaaaaacaaaatcccaagtatgcaagttgggttcatagatgccatctgcttgcaactgtatgaggccctgacccacgtgtcagaggactgtttccctttgctagatggctgcagaaagaacaggcagaaatggcaggcccttgcagaacagcag

SEQ ID NO: 8815 - DNA, 978 bp, Artificial Sequence
  source: /note="Description of Artificial Sequence: Synthetic Destabilizing Domain (DD)"
gaagaaacaagagagctacagtcgttagcggctgctgtggtaccatctgcccagacccttaaaattactgactttagcttcagtgactttgagctgtctgatctggaaacagcactgtgtacaattcggatgtttactgacctcaaccttgtgcagaacttccagatgaaacatgaggttctttgcagatggattttaagtgttaagaagaattatcggaagaatgttgcctatcataattggagacatgcctttaatacagctcagtgcatgtttgctgctctaaaagcaggcaaaattcagaacaagctgactgacctggagatacttgcattgctgattgctgcactaagccacgatttggatcaccgtggtgtgaataactcttacatacagcgaagtgaacatccacttgcccagctttactgcttttcaatcatggaacaccatcattttgaccagtgcctgatgattcttaatagtccaggcaatcagattctctttggcctctccattgaagaatataagaccacgttgaaaataatcaagcaagctattttagctacagacctagcactgtacattaagaggcgaggagaattttttgaacttataagaaaaaatcaattcaatttggaagatcctcatcaaaaggagttgtttttggcaatgctgatgacagcttgtgatctttctgcaattacaaaaccctggcctattcaacaacggatagcagaacttgtagcaactgaattttttgatcaaggagacagagagagaaaagaactcaacatagaacccactgatctaatgaacagggagaagaaaaacaaaatcccaagtatgcaagttgggttcatagatgccatctgcttgcaactgtatgaggccctgacccacgtgtcagaggactgtttccctttgctagatggctgcagaaagaacaggcagaaatggcaggcccttgcagaacagcag

SEQ ID NO: 8816 - DNA, 12 bp, Artificial Sequence
  source: /note="Description of Artificial Sequence: Synthetic Linker"
agtctagatgga

SEQ ID NO: 8817 - DNA, 57 bp, Artificial Sequence; identical to SEQ ID NO: 8784
  source: /note="Description of Artificial Sequence: Synthetic Cleavage site"

SEQ ID NO: 8818 - DNA, 2478 bp, Artificial Sequence
  source: /note="Description of Artificial Sequence: Synthetic Construct"
atggtgagcaagggcgccgagctgttcaccggcatcgtgcccatcctgatcgagctgaatggcgatgtgaatggccacaagttcagcgtgagcggcgagggcgagggcgatgccacctacggcaagctgaccctgaagttcatctgcaccaccggcaagctgcctgtgccctggcccaccctggtgaccaccctgagctacggcgtgcagtgcttctcacgctaccccgatcacatgaagcagcacgacttcttcaagagcgccatgcctgagggctacatccaggagcgcaccatcttcttcgaggatgacggcaactacaagtcgcgcgccgaggtgaagttcgagggcgataccctggtgaatcgcatcgagctgaccggcaccgatttcaaggaggatggcaacatcctgggcaataagatggagtacaactacaacgcccacaatgtgtacatcatgaccgacaaggccaagaatggcatcaaggtgaacttcaagatccgccacaacatcgaggatggcagcgtgcagctggccgaccactaccagcagaatacccccatcggcgatggccctgtgctgctgcccgataaccactacctgtccacccagagcgccctgtccaaggaccccaacgagaagcgcgatcacatgatctacttcggcttcgtgaccgccgccgccatcacccacggcatggatgagctgtacaagggatccgaagaaacaagagagctacagtcgttagcggctgctgtggtgccatctgcccagacccttaaaattactgactttagcttcagtgactttgagctgtctgatctggaaacagcactgaatacaattcggatgtttactgacctcaaccttgtgcagaacttccagatgaaacatgaggttctttgcagatggattttaagtgttaagaagaattatcggaagaatgttgcctatcataattggagacatgcctttaatacagctcagtgcatgtttgctgctctaaaagcaggcaaaattcagaacaagctgactgacctggagatacttgcattgctgattgctgcactaagccacgatttggatcaccgtggtgtgaataactcttacatacagcgaagtgaacatccacttgcccagctttactgccattcaatcatggaacaccatcattttgaccagtgcctgatgattcttaatagtccaggcaatcagattctcagtggcctctccattgaagaatataagaccacgttgaaaataatcaagcaagctattttagctacagacctagcactgtacattaagaggcgaggagaattttttgaacttataagaaaaaatcaattcaatttggaagatcctcatcaaaaggagttgtttttggcaatgctgatgacagcttgtgatctttctgcaattacaaaaccctggcctattcaacaacggatagcagaacttgtagcaactgaattttttgatcaaggagacagagagagaaaagaactcaacatagaacccactgatctaatgaacagggagaagaaaaacaaaatcccaagtatgcaagttgggttcatagatgccatctgcttgcaactgtatgaggccctgacccacgtgtcagaggactgtttccctttgctagatggctgcagaaagaacaggcagaaatggcaggcccttgcagaacagcagagtctagatggagctactaacttcagcctgctgaagcaggctggagacgtggaggagaaccctggacctttgagcaagggcgaggaggacaacatggccatcatcaaggagttcatgcgcttcaaggtgcacatggagggctccgtgaacggccacgagttcgagatcgagggcgagggcgagggccgcccctacgagggcacccagaccgccaagctgaaggtgaccaagggcggccccctgcccttcgcctgggacatcctgtcccctcagttcatgtacggctccaaggcctacgtgaagcaccccgccgacatccccgactacttgaagctgtccttccccgagggcttcaagtgggagcgcgtgatgaacttcgaggacggcggcgtggtgaccgtgacccaggactcctccctgcaggacggcgagttcatctacaaggtgaagctgcgcggcaccaacttcccctccgacggccccgtaatgcagaagaagaccatgggctgggaggcctcctccgagcggatgtaccccgaggacggcgccctgaagggcgagatcaagcagaggctgaagctgaaggacggcggccactacgacgccgaggtcaagaccacctacaaggccaagaagcccgtgcagctgcccggcgcctacaacgtcaacatcaagctggacatcacctcccacaacgaggactacaccatcgtggaacagtacgagcgcgccgagggccgccactccaccggcggcatggacgagctgtacaagtaa

SEQ ID NO: 8819 - DNA, 2478 bp, Artificial Sequence
  source: /note="Description of Artificial Sequence: Synthetic Construct"
atggtgagcaagggcgccgagctgttcaccggcatcgtgcccatcctgatcgagctgaatggcgatgtgaatggccacaagttcagcgtgagcggcgagggcgagggcgatgccacctacggcaagctgaccctgaagttcatctgcaccaccggcaagctgcctgtgccctggcccaccctggtgaccaccctgagctacggcgtgcagtgcttctcacgctaccccgatcacatgaagcagcacgacttcttcaagagcgccatgcctgagggctacatccaggagcgcaccatcttcttcgaggatgacggcaactacaagtcgcgcgccgaggtgaagttcgagggcgataccctggtgaatcgcatcgagctgaccggcaccgatttcaaggaggatggcaacatcctgggcaataagatggagtacaactacaacgcccacaatgtgtacatcatgaccgacaaggccaagaatggcatcaaggtgaacttcaagatccgccacaacatcgaggatggcagcgtgcagctggccgaccactaccagcagaatacccccatcggcgatggccctgtgctgctgcccgataaccactacctgtccacccagagcgccctgtccaaggaccccaacgagaagcgcgatcacatgatctacttcggcttcgtgaccgccgccgccatcacccacggcatggatgagctgtacaagggatccgaaaaaacaagagagctacagtcgttagcggctgctgtggtgccatctgcccagacccttaaaattactgactttagcttcagtgactttgagctgtctgatctggaaacagcactgtgtacaattcggatgtttactgacctcaaccttgtgcagaacttccagatgaaacatgaggttctttgcagatggattttaagtgttaagaagaattatcggaagaatgttgcctatcataattggagacatgcctttaatacagctcagtgcatgtttgctgctctaaaagcaggcaaaattcagaacaagctgactgacctggagatacttgcattgctgattgctgcactaagccacgatttggatcaccgtggtgtgaataactcttacatacagcgaagtgaacatccacttgcccagctttactgccattcaatcatggaacaccatcattttgaccagtgcctgatgattcttaatagtccaggcaatcagattctcagtggcctctccattgaagaatataagaccacgttgaaaataatcaagcaagctattttagctacagacctagcactgtacattaagaggcgaggagaattttttgaactttggagaaaaaatcaattcaatttggaagatcctcatcaaaaggagttgtttttggcaatgctgatgacagcttgtgatctttctgcaattacaaaaccctggcctattcaacaacggatagcagaacttgtagcaactgaattttttgatcaaggagacagagagagaaaagaactcaacatagaacccactgatctaatgaacagggagaagaaaaacaaaatcccaagtatgcaagttgggttcatagatgccatctgcttgcaactgtatgaggccctgacccacgtgtcagaggactgtttccctttgctagatggctgcagaaagaacaggcagaaatggcaggcccttgcagaacagcagagtctagatggagctactaacttcagcctgctgaagcaggctggagacgtggaggagaaccctggacctttgagcaagggcgaggaggacaacatggccatcatcaaggagttcatgcgcttcaaggtgcacatggagggctccgtgaacggccacgagttcgagatcgagggcgagggcgagggccgcccctacgagggcacccagaccgccaagctgaaggtgaccaagggcggccccctgcccttcgcctgggacatcctgtcccctcagttcatgtacggctccaaggcctacgtgaagcaccccgccgacatccccgactacttgaagctgtccttccccgagggcttcaagtgggagcgcgtgatgaacttcgaggacggcggcgtggtgaccgtgacccaggactcctccctgcaggacggcgagttcatctacaaggtgaagctgcgcggcaccaacttcccctccgacggccccgtaatgcagaagaagaccatgggctgggaggcctcctccgagcggatgtaccccgaggacggcgccctgaagggcgagatcaagcagaggctgaagctgaaggacggcggccactacgacgccgaggtcaagaccacctacaaggccaagaagcccgtgcagctgcccggcgcctacaacgtcaacatcaagctggacatcacctcccacaacgaggactacaccatcgtggaacagtacgagcgcgccgagggccgccactccaccggcggcatggacgagctgtacaagtaa

SEQ ID NO: 8820 - DNA, 2478 bp, Artificial Sequence
  source: /note="Description of Artificial Sequence: Synthetic Construct"
atggtgagcaagggcgccgagctgttcaccggcatcgtgcccatcctgatcgagctgaatggcgatgtgaatggccacaagttcagcgtgagcggcgagggcgagggcgatgccacctacggcaagctgaccctgaagttcatctgcaccaccggcaagctgcctgtgccctggcccaccctggtgaccaccctgagctacggcgtgcagtgcttctcacgctaccccgatcacatgaagcagcacgacttcttcaagagcgccatgcctgagggctacatccaggagcgcaccatcttcttcgaggatgacggcaactacaagtcgcgcgccgaggtgaagttcgagggcgataccctggtgaatcgcatcgagctgaccggcaccgatttcaaggaggatggcaacatcctgggcaataagatggagtacaactacaacgcccacaatgtgtacatcatgaccgacaaggccaagaatggcatcaaggtgaacttcaagatccgccacaacatcgaggatggcagcgtgcagctggccgaccactaccagcagaatacccccatcggcgatggccctgtgctgctgcccgataaccactacctgtccacccagagcgccctgtccaaggaccccaacgagaagcgcgatcacatgatctacttcggcttcgtgaccgccgccgccatcacccacggcatggatgagctgtacaagggatccgaagaaacaagagagctacagtcgttagcggctgctgtggtaccatctgcccagacccttaaaattactgactttagcttcagtgactttgagctgtctgatctggaaacagcactgtgtacaattcggatgtttactgacctcaaccttgtgcagaacttccagatgaaacatgaggttctttgcagatggattttaagtgttaagaagaattatcggaagaatgttgcctatcataattggagacatgcctttaatacagctcagtgcatgtttgctgctctaaaagcaggcaaaattcagaacaagctgactgacctggagatacttgcattgctgattgctgcactaagccacgatttggatcaccgtggtgtgaataactcttacatacagcgaagtgaacatccacttgcccagctttactgcttttcaatcatggaacaccatcattttgaccagtgcctgatgattcttaatagtccaggcaatcagattctctttggcctctccattgaagaatataagaccacgttgaaaataatcaagcaagctattttagctacagacctagcactgtacattaagaggcgaggagaattttttgaacttataagaaaaaatcaattcaatttggaagatcctcatcaaaaggagttgtttttggcaatgctgatgacagcttgtgatctttctgcaattacaaaaccctggcctattcaacaacggatagcagaacttgtagcaactgaattttttgatcaaggagacagagagagaaaagaactcaacatagaacccactgatctaatgaacagggagaagaaaaacaaaatcccaagtatgcaagttgggttcatagatgccatctgcttgcaactgtatgaggccctgacccacgtgtcagaggactgtttccctttgctagatggctgcagaaagaacaggcagaaatggcaggcccttgcagaacagcagagtctagatggagctactaacttcagcctgctgaagcaggctggagacgtggaggagaaccctggacctttgagcaagggcgaggaggacaacatggccatcatcaaggagttcatgcgcttcaaggtgcacatggagggctccgtgaacggccacgagttcgagatcgagggcgagggcgagggccgcccctacgagggcacccagaccgccaagctgaaggtgaccaagggcggccccctgcccttcgcctgggacatcctgtcccctcagttcatgtacggctccaaggcctacgtgaagcaccccgccgacatccccgactacttgaagctgtccttccccgagggcttcaagtgggagcgcgtgatgaacttcgaggacggcggcgtggtgaccgtgacccaggactcctccctgcaggacggcgagttcatctacaaggtgaagctgcgcggcaccaacttcccctccgacggccccgtaatgcagaagaagaccatgggctgggaggcctcctccgagcggatgtaccccgaggacggcgccctgaagggcgagatcaagcagaggctgaagctgaaggacggcggccactacgacgccgaggtcaagaccacctacaaggccaagaagcccgtgcagctgcccggcgcctacaacgtcaacatcaagctggacatcacctcccacaacgaggactacaccatcgtggaacagtacgagcgcgccgagggccgccactccaccggcggcatggacgagctgtacaagtaa

SEQ ID NO: 8821 - protein, 326 aa, Artificial Sequence
  source: /note="Description of Artificial Sequence: Synthetic Destabilizing Domain (DD)"
EETRELQSLAAAVVPSAQTLKITDFSFSDFELSDLETALCTIRMFTDLNLVQNFQMKHEVLCRWILSVKKNYRKNVAYHNWRHAFNTAQCMFAALKAGKIQNKLTDLEILALLIAALSHDLDHRGVNNSYIQRSGHPLAQLYCHSIMEHHHFDQCLMILNSPGNQTLSGLSIEEYKTTLKIIKQAILATDLALYIKRRGEFFELIRKNQFNLEDPHQKELFLAMLMTACDLSAITKPWPIQQRIAELVATEFFDQGDRERKELNIEPTDLMNREKKNKIPSMQVGFIDAICLQLYEALTHVSEDCFPLLDGCRKNRQKWQALAEQQ

SEQ ID NO: 8822 - protein, 326 aa, Artificial Sequence
  source: /note="Description of Artificial Sequence: Synthetic Destabilizing Domain (DD)"
EETRELQSLAAAVVPSAQTLKITDFSFSDFELSDLETALCTIRMFTDLNLVQNFQMKHEVLCRWILSVKKNYRKNVAYHNWRHAFNTAQCMFAALKASKIQNKLTDLEILALLTAALSHDLDHRGVNNSYIQRSEHPLAQLYCHSIMEHHHFDQCLMILNSPGNQILSGLSIEEYKTTLKIIKQAILATDLALYIKRRGEFFELIRKNQFNLEDPHQKELFLAMLMTACDLSAITKPWPIQQRIAELVATEFFDQGDRERKELNIEPTDLMNREKKNKIPSMQVGFIDAICLQLYEALTHVSEDCFPLLDGCRKNRQKWQALAEQQ

SEQ ID NO: 8823 - protein, 240 aa, Artificial Sequence
  source: /note="Description of Artificial Sequence: Synthetic Destabilizing Domain (DD)"
EETRELQSLAAAVVPSAQTLKITDFSFSDFELSDLETALCTIRMFTDLNLVQNFQMKHEVLCRWILSVKKNYRKNVAYHNWRHAFNTAQCMFAALKAGKIQNKLTDLEILASLIAALSHDLDHRGVNNSYIQRSEHPLAQLYCHSIMEHHHFDQCLMILNSPGNQILSGLSIEEYKTTLKIIKQAILATDLALYIKRRGEFFELIRKNQFNLEDPHQKELFLAMLMTACDLSAITKPWPI

SEQ ID NO: 8824 - protein, 326 aa, Artificial Sequence
  source: /note="Description of Artificial Sequence: Synthetic Destabilizing Domain (DD)"
EETRELQSLAAAVVPSAQTLKITDFSFSDFELSDLETALCTIRMFTDLNLVQNFQMKHEVLCRWILSVKKNYRKNVAYHNWRHAFNTAQCMFAALKAGKIQNKLTDLEILALLIAALSHDLDHRGVNNSYIQRSEHPLAQLYCHSIMEHHHFDQCLMILNSPGNQILSGLSIEEYKTTLKIIKQAILATDLALYIKRRGEFFELIRKNQFNLEDPHQKELFLAMLMTVCDLSAITKPWPIQQRIAELVATEFFDQGDRERKELNIEPTDLMNREKKNKIPSMQVGFIDAICLQLYEALTHVSEDCFPLLDGCRKNRQKWQALAEQQ

SEQ ID NO: 8825 - protein, 326 aa, Artificial Sequence
  source: /note="Description of Artificial Sequence: Synthetic Destabilizing Domain (DD)"
EETRELQSLAAAVVPSAQTLKITDFSFSDFELSDLETALCTIRMFTDLNLVQNFQMKHEVLCRWILSVKKNYRKNVAYHNWRHAFNTAQCMFAALKAGKIQNKLTNLEILALLIAALSHDLDHRGVNNSYIQRSEHPLAQLYCHSIMEHHHFDQCLMILNSPGNQILSGLSIEEYKTTLKIIKQAILATDLALYIKRRGEFFELIRKNQFNLEDPHQKELFLAMLMTACDLSAITKPWPIQQRIAELVATEFFDQGDRERKELNIEPTDLMNREKKNKIPSMQVGFIDAICLQLYEALTHVSEDCFPLLDGCRKNRQKWQALAEQQ

SEQ ID NO: 8826 - protein, 326 aa, Artificial Sequence; identical to SEQ ID NO: 38
  source: /note="Description of Artificial Sequence: Synthetic Destabilizing Domain (DD)"

SEQ ID NO: 8827 - protein, 326 aa, Artificial Sequence
  source: /note="Description of Artificial Sequence: Synthetic Destabilizing Domain (DD)"
EETRELQSLAAAVVPSAQTLKITDFSFSDFELSDLETALCTIRMFTDLNLVQNFQMKHEVLCRWILSVKKNYRKNVAYHNWRHAFNTARCMFAALKAGKIQNKLTDLEILALLIAALSHGLDHRGVNNSYIQRSEHPLAQLYCHSIMEHHHFDQCLMILNSPGNQILSGLSIEEYKTTLKIIKQAILATDLALYIKRRGEFFELIRNNQFNLEDPHQKELFLAMLMTACDLSAITKPWPIQQRIAELVATEFFDQGDRERKELNIEPTDLMNREKKNKIPSMQVGFIDAICLQLYEALTHVSEDCFPLLDGCRKNRQKWQALAEQQ

SEQ ID NO: 8828 - protein, 326 aa, Artificial Sequence
  source: /note="Description of Artificial Sequence: Synthetic Destabilizing Domain (DD)"
EETRELQSLAAAVVPSAQTLKITDFSFSDFELSDLETALCTIRMFTDLNLVQNFQMKHEVLCRWILSVKKNYRKNVAYHNWRHAFNTAQCMFAALKAGKIQNKLTDLEILALLIAALSHDLDHRGVNNSYIQRSEHPLTQLYCHSIMEHHHFDQCLMILNSPGNQILSGLSIEEYKTTLKIIKQAILATDLALYIKRRGEFFELIRKNQFNLEDPHQKELFVAMLMTACDLSAITKPWPIQQRIAELVATEFFDQGDRERKELNIEPTDLMNREKKNKIPSMQVGFIDAICLQLYEALTHVSEDCFPLLDGYRKNRQKWQALAEQQ

SEQ ID NO: 8829 - protein, 326 aa, Artificial Sequence
  source: /note="Description of Artificial Sequence: Synthetic Destabilizing Domain (DD)"
EETRELQSLAAAVVPSAQTLKITDFSFSDFELSDLETALCTIRMFTDLNLVQNFQMKHEVLCRWILSVKKNYRKNVAYHNWRHAFNTAQCMFAALKAGKIQNKLTDLEILALLIAALSHDLDHRGANNSYIQRSEHPLAQLYCHSIMEHHHFDQCLMILNSPGNQILSGLSIEEYKTTLKIIKQAILATDLALYIKRRGEFFELIRKNQFNLEDPHQKELFLAMLMTACDLSAITKPWPIQQRIAEFVATEFFDQGDREGKELNIEPTDLMNREKKNKIPSMQVGFIDAIRLQLYEALTHVSEDCFPLLDGCRKNRQKWQALAGQQ

SEQ ID NO: 8830 - protein, 326 aa, Artificial Sequence
  source: /note="Description of Artificial Sequence: Synthetic Destabilizing Domain (DD)"
EETRELQSLAAAVVPSAQTLKITDFSFSDFELSDLETALCTIRMFTDLNLVQNFQMKHEVLCRWILSVKKNYRKNVAYHNWRHAFNTAQCMFAALKAGKIQNKLTDLGILALLIAALSHDLDHRGVNNSYIQRSEHPLAQLYCHSIMEHHHFDQCLMILNSPDNQILSGLSIEEYKTTLKIIKQAILATDLALYIKRRGEFFELIRKNQFNLEDPHQKELFLAMLMTACDLSAITKPWPIQQRIAELVATEFFDQGDRERKELNIEPTDLMNREKKNKTPSMQVGFIDAICLQLYEALTHVSEDCFPLLDGCRKNRQKWQALAEQQ

SEQ ID NO: 8831 - protein, 569 aa, Artificial Sequence
  source: /note="Description of Artificial Sequence: Synthetic Construct"
MVSKGAELFTGIVPILIELNGDVNGHKFSVSGEGEGDATYGKLTLKFICTTGKLPVPWPTLVTTLSYGVQCFSRYPDHMKQHDFFKSAMPEGYIQERTIFFEDDGNYKSRAEVKFEGDTLVNRIELTGTDFKEDGNILGNKMEYNYNAHNVYIMTDKAKNGIKVNFKIRHNIEDGSVQLADHYQQNTPIGDGPVLLPDNHYLSTQSALSKDPNEKRDHMIYFGFVTAAAITHGMDELYKGSEETRELQSLAAAVVPSAQTLKITDFSFSDFELSDLETALCTIRMFTDLNLVQNFQMKHEVLCRWILSVKKNYRKNVAYHNWRHAFNTAQCMFAALKAGKIQNKLTDLEILALLIAALSHDLDHRGVNNSYIQRSGHPLAQLYCHSIMEHHHFDQCLMILNSPGNQTLSGLSIEEYKTTLKIIKQAILATDLALYIKRRGEFFELIRKNQFNLEDPHQKELFLAMLMTACDLSAITKPWPIQQRIAELVATEFFDQGDRERKELNIEPTDLMNREKKNKIPSMQVGFIDAICLQLYEALTHVSEDCFPLLDGCRKNRQKWQALAEQQSR

SEQ ID NO: 8832 - protein, 569 aa, Artificial Sequence
  source: /note="Description of Artificial Sequence: Synthetic Construct"
MVSKGAELFTGIVPILIELNGDVNGHKFSVSGEGEGDATYGKLTLKFICTTGKLPVPWPTLVTTLSYGVQCFSRYPDHMKQHDFFKSAMPEGYIQERTIFFEDDGNYKSRAEVKFEGDTLVNRIELTGTDFKEDGNILGNKMEYNYNAHNVYIMTDKAKNGIKVNFKIRHNIEDGSVQLADHYQQNTPIGDGPVLLPDNHYLSTQSALSKDPNEKRDHMIYFGFVTAAAITHGMDELYKGSEETRELQSLAAAVVPSAQTLKITDFSFSDFELSDLETALCTIRMFTDLNLVQNFQMKHEVLCRWILSVKKNYRKNVAYHNWRHAFNTAQCMFAALKASKIQNKLTDLEILALLTAALSHDLDHRGVNNSYIQRSEHPLAQLYCHSIMEHHHFDQCLMILNSPGNQILSGLSIEEYKTTLKIIKQAILATDLALYIKRRGEFFELIRKNQFNLEDPHQKELFLAMLMTACDLSAITKPWPIQQRIAELVATEFFDQGDRERKELNIEPTDLMNREKKNKIPSMQVGFIDAICLQLYEALTHVSEDCFPLLDGCRKNRQKWQALAEQQSR

SEQ ID NO: 8833 - protein, 483 aa, Artificial Sequence
  source: /note="Description of Artificial Sequence: Synthetic Construct"
MVSKGAELFTGIVPILIELNGDVNGHKFSVSGEGEGDATYGKLTLKFICTTGKLPVPWPTLVTTLSYGVQCFSRYPDHMKQHDFFKSAMPEGYIQERTIFFEDDGNYKSRAEVKFEGDTLVNRIELTGTDFKEDGNILGNKMEYNYNAHNVYIMTDKAKNGIKVNFKIRHNIEDGSVQLADHYQQNTPIGDGPVLLPDNHYLSTQSALSKDPNEKRDHMIYFGFVTAAAITHGMDELYKGSEETRELQSLAAAVVPSAQTLKITDFSFSDFELSDLETALCTIRMFTDLNLVQNFQMKHEVLCRWILSVKKNYRKNVAYHNWRHAFNTAQCMFAALKAGKIQNKLTDLEILASLIAALSHDLDHRGVNNSYIQRSEHPLAQLYCHSIMEHHHFDQCLMILNSPGNQILSGLSIEEYKTTLKIIKQAILATDLALYIKRRGEFFELIRKNQFNLEDPHQKELFLAMLMTACDLSAITKPWPISR

SEQ ID NO: 8834 - protein, 569 aa, Artificial Sequence
  source: /note="Description of Artificial Sequence: Synthetic Construct"
MVSKGAELFTGIVPILIELNGDVNGHKFSVSGEGEGDATYGKLTLKFICTTGKLPVPWPTLVTTLSYGVQCFSRYPDHMKQHDFFKSAMPEGYIQERTIFFEDDGNYKSRAEVKFEGDTLVNRIELTGTDFKEDGNILGNKMEYNYNAHNVYIMTDKAKNGIKVNFKIRHNIEDGSVQLADHYQQNTPIGDGPVLLPDNHYLSTQSALSKDPNEKRDHMIYFGFVTAAAITHGMDELYKGSEETRELQSLAAAVVPSAQTLKITDFSFSDFELSDLETALCTIRMFTDLNLVQNFQMKHEVLCRWILSVKKNYRKNVAYHNWRHAFNTAQCMFAALKAGKIQNKLTDLEILALLIAALSHDLDHRGVNNSYIQRSEHPLAQLYCHSIMEHHHFDQCLMILNSPGNQILSGLSIEEYKTTLKIIKQAILATDLALYIKRRGEFFELIRKNQFNLEDPHQKELFLAMLMTVCDLSAITKPWPIQQRIAELVATEFFDQGDRERKELNIEPTDLMNREKKNKIPSMQVGFIDAICLQLYEALTHVSEDCFPLLDGCRKNRQKWQALAEQQSR

SEQ ID NO: 8835 - protein, 569 aa, Artificial Sequence
  source: /note="Description of Artificial Sequence: Synthetic Construct"
MVSKGAELFTGIVPILIELNGDVNGHKFSVSGEGEGDATYGKLTLKFICTTGKLPVPWPTLVTTLSYGVQCFSRYPDHMKQHDFFKSAMPEGYIQERTIFFEDDGNYKSRAEVKFEGDTLVNRIELTGTDFKEDGNILGNKMEYNYNAHNVYIMTDKAKNGIKVNFKIRHNIEDGSVQLADHYQQNTPIGDGPVLLPDNHYLSTQSALSKDPNEKRDHMIYFGFVTAAAITHGMDELYKGSEETRELQSLAAAVVPSAQTLKITDFSFSDFELSDLETALCTIRMFTDLNLVQNFQMKHEVLCRWILSVKKNYRKNVAYHNWRHAFNTAQCMFAALKAGKIQNKLTNLEILALLIAALSHDLDHRGVNNSYIQRSEHPLAQLYCHSIMEHHHFDQCLMILNSPGNQILSGLSIEEYKTTLKIIKQAILATDLALYIKRRGEFFELIRKNQFNLEDPHQKELFLAMLMTACDLSAITKPWPIQQRIAELVATEFFDQGDRERKELNIEPTDLMNREKKNKIPSMQVGFIDAICLQLYEALTHVSEDCFPLLDGCRKNRQKWQALAEQQSR

SEQ ID NO: 8836 - protein, 569 aa, Artificial Sequence
  source: /note="Description of Artificial Sequence: Synthetic Construct"
MVSKGAELFTGIVPILIELNGDVNGHKFSVSGEGEGDATYGKLTLKFICTTGKLPVPWPTLVTTLSYGVQCFSRYPDHMKQHDFFKSAMPEGYIQERTIFFEDDGNYKSRAEVKFEGDTLVNRIELTGTDFKEDGNILGNKMEYNYNAHNVYIMTDKAKNGIKVNFKIRHNIEDGSVQLADHYQQNTPIGDGPVLLPDNHYLSTQSALSKDPNEKRDHMIYFGFVTAAAITHGMDELYKGSEETRELQSLAAAVVPSAQTLKITDFSFSDFELSDLETALCTIRMFTDLNLVQNFQMKHEVLCRWILSVKKNYRKNVAYHNWRHAFNTAQCMFAALKAGKIQSKLTDLEILALLIAALSHDLDHRGVNNSYIQRSEHPLAQLYCHSIMEHHHFDQCLMILNSPGNQILSGLSIEEYKTTLKIIKQAILATDLALYIKRRGEFFELIRKNQFNLEDPHQKELFLAMLMTACDLSAITKPWPIQQRIAELVATEFFDQGDRERKELNIEPTDLMNREKKNKIPSMQVGFIDAICLQLYEALTHVSEDCFPLLDGCRKNRQKWQALAEQQSR

SEQ ID NO: 8837 - protein, 569 aa, Artificial Sequence
  source: /note="Description of Artificial Sequence: Synthetic Construct"
MVSKGAELFTGIVPILIELNGDVNGHKFSVSGEGEGDATYGKLTLKFICTTGKLPVPWPTLVTTLSYGVQCFSRYPDHMKQHDFFKSAMPEGYIQERTIFFEDDGNYKSRAEVKFEGDTLVNRIELTGTDFKEDGNILGNKMEYNYNAHNVYIMTDKAKNGIKVNFKIRHNIEDGSVQLADHYQQNTPIGDGPVLLPDNHYLSTQSALSKDPNEKRDHMIYFGFVTAAAITHGMDELYKGSEETRELQSLAAAVVPSAQTLKITDFSFSDFELSDLETALCTIRMFTDLNLVQNFQMKHEVLCRWILSVKKNYRKNVAYHNWRHAFNTARCMFAALKAGKIQNKLTDLEILALLIAALSHGLDHRGVNNSYIQRSEHPLAQLYCHSIMEHHHFDQCLMILNSPGNQILSGLSIEEYKTTLKIIKQAILATDLALYIKRRGEFFELIRNNQFNLEDPHQKELFLAMLMTACDLSAITKPWPIQQRIAELVATEFFDQGDRERKELNIEPTDLMNREKKNKIPSMQVGFIDAICLQLYEALTHVSEDCFPLLDGCRKNRQKWQALAEQQSR

SEQ ID NO: 8838 - protein, 569 aa, Artificial Sequence
  source: /note="Description of Artificial Sequence: Synthetic Construct"
MVSKGAELFTGIVPILIELNGDVNGHKFSVSGEGEGDATYGKLTLKFICTTGKLPVPWPTLVTTLSYGVQCFSRYPDHMKQHDFFKSAMPEGYIQERTIFFEDDGNYKSRAEVKFEGDTLVNRIELTGTDFKEDGNILGNKMEYNYNAHNVYIMTDKAKNGIKVNFKIRHNIEDGSVQLADHYQQNTPIGDGPVLLPDNHYLSTQSALSKDPNEKRDHMIYFGFVTAAAITHGMDELYKGSEETRELQSLAAAVVPSAQTLKITDFSFSDFELSDLETALCTIRMFTDLNLVQNFQMKHEVLCRWILSVKKNYRKNVAYHNWRHAFNTAQCMFAALKAGKIQNKLTDLEILALLIAALSHDLDHRGVNNSYIQRSEHPLTQLYCHSIMEHHHFDQCLMILNSPGNQILSGLSIEEYKTTLKIIKQAILATDLALYIKRRGEFFELIRKNQFNLEDPHQKELFVAMLMTACDLSAITKPWPIQQRIAELVATEFFDQGDRERKELNIEPTDLMNREKKNKIPSMQVGFIDAICLQLYEALTHVSEDCFPLLDGYRKNRQKWQALAEQQSR

SEQ ID NO: 8839 - protein, 569 aa, Artificial Sequence
  source: /note="Description of Artificial Sequence: Synthetic Construct"
MVSKGAELFTGIVPILIELNGDVNGHKFSVSGEGEGDATYGKLTLKFICTTGKLPVPWPTLVTTLSYGVQCFSRYPDHMKQHDFFKSAMPEGYIQERTIFFEDDGNYKSRAEVKFEGDTLVNRIELTGTDFKEDGNILGNKMEYNYNAHNVYIMTDKAKNGIKVNFKIRHNIEDGSVQLADHYQQNTPIGDGPVLLPDNHYLSTQSALSKDPNEKRDHMIYFGFVTAAAITHGMDELYKGSEETRELQSLAAAVVPSAQTLKITDFSFSDFELSDLETALCTIRMFTDLNLVQNFQMKHEVLCRWILSVKKNYRKNVAYHNWRHAFNTAQCMFAALKAGKIQNKLTDLEILALLIAALSHDLDHRGANNSYIQRSEHPLAQLYCHSIMEHHHFDQCLMILNSPGNQILSGLSIEEYKTTLKIIKQAILATDLALYIKRRGEFFELIRKNQFNLEDPHQKELFLAMLMTACDLSAITKPWPIQQRIAEFVATEFFDQGDREGKELNIEPTDLMNREKKNKIPSMQVGFIDAIRLQLYEALTHVSEDCFPLLDGCRKNRQKWQALAGQQSR

SEQ ID NO: 8840 - protein, 569 aa, Artificial Sequence
  source: /note="Description of Artificial Sequence: Synthetic Construct"
MVSKGAELFTGIVPILIELNGDVNGHKFSVSGEGEGDATYGKLTLKFICTTGKLPVPWPTLVTTLSYGVQCFSRYPDHMKQHDFFKSAMPEGYIQERTIFFEDDGNYKSRAEVKFEGDTLVNRIELTGTDFKEDGNILGNKMEYNYNAHNVYIMTDKAKNGIKVNFKIRHNIEDGSVQLADHYQQNTPIGDGPVLLPDNHYLSTQSALSKDPNEKRDHMIYFGFVTAAAITHGMDELYKGSEETRELQSLAAAVVPSAQTLKITDFSFSDFELSDLETALCTIRMFTDLNLVQNFQMKHEVLCRWILSVKKNYRKNVAYHNWRHAFNTAQCMFAALKAGKIQNKLTDLGILALLIAALSHDLDHRGVNNSYIQRSEHPLAQLYCHSIMEHHHFDQCLMILNSPDNQILSGLSIEEYKTTLKIIKQAILATDLALYIKRRGEFFELIRKNQFNLEDPHQKELFLAMLMTACDLSAITKPWPIQQRIAELVATEFFDQGDRERKELNIEPTDLMNREKKNKTPSMQVGFIDAICLQLYEALTHVSEDCFPLLDGCRKNRQKWQALAEQQSR

SEQ ID NO: 8841 - DNA, 978 bp, Artificial Sequence
  source: /note="Description of Artificial Sequence: Synthetic Destabilizing Domain (DD)"
gaagaaacaagagagctacagtcgttagcggctgctgtggtgccatctgcccagacccttaaaattactgactttagcttcagtgactttgagctgtctgatctagaaacagcactgtgtacaattcggatgtttactgacctcaaccttgtgcagaacttccagatgaaacatgaggttctttgcagatggattttaagtgttaagaagaattatcggaagaatgttgcctatcataattggagacatgcctttaatacagctcagtgcatgtttgctgctctaaaagcaggcaaaattcagaacaagctgactgacctggagatacttgcattgctgattgctgcactaagccacgatttggatcaccgtggtgtgaataactcttacatacagcgaagtggacatccacttgcccagctttactgccattcaatcatggaacaccatcattttgaccagtgcctgatgattcttaatagtccaggcaatcagactctcagtggcctctccattgaagaatataagaccacgttgaaaataatcaagcaagctattttagctacagacctagcactgtacattaagaggcgaggagaattttttgaacttataagaaaaaatcaattcaatttggaagatcctcatcaaaaggagttgtttttggcaatgctgatgacagcttgtgatctttctgcaattacaaaaccctggcctattcaacaacggatagcagaacttgtagcaactgaattttttgatcaaggagacagagagagaaaagaactcaacatagaacccactgatctaatgaacagggagaagaaaaacaaaatcccaagtatgcaagttgggttcatagacgccatctgcttgcaactgtatgaggccctgacccacgtgtcagaggactgtttccctttgctagatggctgcagaaagaacaggcagaaatggcaggcccttgcagaacagcag

SEQ ID NO: 8842 - DNA, 978 bp, Artificial Sequence
  source: /note="Description of Artificial Sequence: Synthetic Destabilizing Domain (DD)"
gaagaaacaagagagctacagtcgttagcggctgctgtggtgccatctgcccagacccttaaaattactgactttagcttcagtgactttgagctgtctgatctggaaacagcactgtgtacaattcggatgtttactgacctcaaccttgtgcagaacttccagatgaaacatgaggttctttgcagatggattttaagtgttaagaagaattatcggaagaatgttgcctatcataattggagacatgcctttaatacagctcagtgcatgtttgctgctctaaaagcaagcaaaattcagaacaagctgactgacctggagatacttgcattgctgactgctgcactaagccacgatttggatcaccgtggtgtgaataactcttacatacagcgaagtgaacatccacttgcccagctttactgccactcaatcatggaacaccatcattttgaccagtgcctgatgattcttaatagtccaggcaatcagattctcagtggcctctccattgaagaatataagaccacgttgaaaataatcaagcaagctattttagctacagacctagcactgtacattaagaggcgaggagaattttttgaacttataagaaaaaatcaattcaatttggaagatcctcatcaaaaggagttgtttttggcaatgctgatgacagcttgtgatctttctgcaattacaaaaccctggcctattcaacaacggatagcagaacttgtagcaactgaattttttgatcaaggagacagagagagaaaagaactcaacatagaacccactgatctaatgaacagggagaagaaaaacaaaatcccaagtatgcaagttgggttcatagatgccatctgcttgcaactgtatgaggccctgacccacgtgtcagaggactgtttccctttgctagatggctgcagaaagaacaggcagaaatggcaggcccttgcagaacagcag

SEQ ID NO: 8843 - DNA, 720 bp, Artificial Sequence
  source: /note="Description of Artificial Sequence: Synthetic Destabilizing Domain (DD)"
gaagaaacaagagagctacagtcgttagcggctgctgtggtgccatctgcccagacccttaaaattactgactttagcttcagtgactttgagctgtctgatctggaaacagcactgtgtacaattcggatgtttactgacctcaaccttgtgcagaacttccagatgaaacatgaggttctttgcagatggattttaagtgttaagaagaattatcggaagaatgttgcctatcataattggagacatgcctttaatacagctcagtgcatgtttgctgctctaaaagcaggcaaaattcagaacaagctgactgacctggagatacttgcatcgctgattgctgcactaagccacgatttggatcaccgtggtgtgaataactcttacatacagcgaagtgaacatccacttgcccagctttactgccattcaatcatggaacaccatcattttgaccagtgcctgatgattcttaatagtccaggcaaccagattctcagtggcctctccattgaagaatataagaccacgttgaaaataatcaagcaagctattttagctacagacctagcactgtacattaagaggcgaggagaattttttgaacttataagaaaaaatcaattcaatttggaagatcctcatcaaaaggagttgtttttggcaatgctgatgacagcttgtgatctttctgcaattacaaaaccctggcctatt

SEQ ID NO: 8844 - DNA, 978 bp, Artificial Sequence
  source: /note="Description of Artificial Sequence: Synthetic Destabilizing Domain (DD)"
gaagaaacaagagagctacagtcgttagcggctgctgtggtgccatctgcccagacccttaaaattactgactttagcttcagtgactttgagctgtctgatctggaaacagcactgtgtacaattcggatgtttactgacctcaaccttgtgcagaacttccagatgaaacatgaggttctttgcagatggattttaagtgttaagaagaattatcggaagaatgttgcctatcataattggagacatgcctttaatacagctcagtgcatgtttgctgctctaaaagcaggcaaaattcagaacaagctgactgacctggagatacttgcattgctgattgctgcactaagccacgatttggatcaccgtggtgtgaataactcttacatacagcgaagtgaacatccacttgcccagctttactgccattcaatcatggaacaccatcattttgaccagtgcctgatgattcttaatagtccaggcaatcagattctcagtggcctctccattgaagaatataagaccacgttgaaaataatcaagcaagctattttagctacagacctagcactgtacattaagaggcgaggagaattttttgaacttataagaaaaaatcaattcaatttggaagatcctcatcaaaaggagttgtttttggcaatgctgatgacagtttgtgatctttctgcaattacaaaaccctggcctattcaacaacggatagcagaacttgtagcaactgaattttttgatcaaggagacagagagagaaaagaactcaacatagaacccactgatctaatgaacagggagaagaaaaacaaaatcccaagtatgcaagttgggttcatagatgccatctgcttgcaactgtatgaggccctgacccacgtgtcagaggactgtttccctttgctagatggctgcagaaagaacaggcagaaatggcaggcccttgcagaacagcag

SEQ ID NO: 8845 - DNA, 978 bp, Artificial Sequence
  source: /note="Description of Artificial Sequence: Synthetic Destabilizing Domain (DD)"
gaagaaacaagagagctacagtcgttagcggctgctgtggtgccatctgcccagacccttaaaattactgactttagcttcagtgactttgagctgtctgatctggaaacagcactgtgtacaattcggatgtttactgacctcaaccttgtgcagaacttccagatgaaacatgaggttctttgcagatggattttaagtgttaagaagaattaccggaagaatgttgcctatcataattggagacatgcctttaatacagctcagtgcatgttcgctgctctaaaagcaggcaaaattcagaacaagctgactaacctggagatacttgcattgctgattgctgcactaagccacgatttggatcaccgtggtgtgaataactcttacatacagcgaagtgaacatccacttgcccagctttactgccattcaatcatggaacaccatcattttgaccagtgcctgatgattcttaatagtccaggcaatcagattctcagtggcctctccattgaagaatataagaccacgttgaaaataatcaagcaagctattttagctacagacctagcactgtacattaagaggcgaggagaattttttgaacttataagaaaaaatcaattcaatttggaagatcctcatcaaaaggagttgtttttggcaatgctgatgacagcttgtgatctttctgcaattacaaaaccctggcctattcaacaacggatagcagaacttgtagcaactgaattttttgatcaaggagacagagagagaaaagaactcaacatagaacccactgatctaatgaacagggagaagaaaaacaaaatcccaagtatgcaagttgggttcatagatgccatctgcttgcaactgtatgaggccctaacccacgtgtcagaggactgtttccctttgctagatggctgcagaaagaacaggcagaaatggcaggcccttgcagaacagcag

SEQ ID NO: 8846 - DNA, 978 bp, Artificial Sequence
  source: /note="Description of Artificial Sequence: Synthetic Destabilizing Domain (DD)"
gaagaaacaagagagctacagtcgttagcggctgctgtggtgccatctgcccagacccttaaaattactgactttagcttcagtgactttgagctgtctgatctggaaacagcactgtgtacaattcggatgtttactgacctcaaccttgtgcagaacttccagatgaaacatgaggttctttgcagatggattttaagtgttaagaagaattatcggaagaatgttgcctatcataattggagacatgcctttaatacagctcagtgcatgtttgctgctctaaaagcaggcaaaattcagagcaagctgactgacctggagatacttgcattgctgattgctgcactaagccacgatttggatcaccgtggtgtgaataactcttacatacagcgaagtgagcatccacttgcccagctttactgccattcaatcatggaacaccatcattttgaccagtgcctgatgattcttaatagtccaggcaatcagattctcagtggcctctccattgaagaatataagaccacgttgaaaataatcaagcaagctattttagctacagacctagcactgtacattaagaggcgaggagaattttttgaacttataagaaaaaatcaattcaatttggaagatcctcatcaaaaggagttgtttttggcaatgctgatgacagcttgtgatctttctgcaattacaaaaccctggcctattcaacaacggatagcagaacttgtagcaactgaattttttgatcaaggagacagagagagaaaagaactcaacatagaacccactgatctaatgaacagggagaagaaaaacaaaatcccaagtatgcaagttgggttcatagatgccatctgcttgcaactgtatgaggccctgacccacgtgtcagaggactgtttccctttgctagatggctgcagaaagaacaggcagaaatggcaggcccttgcagaacagcag

SEQ ID NO: 8847 - DNA, 978 bp, Artificial Sequence
  source: /note="Description of Artificial Sequence: Synthetic Destabilizing Domain (DD)"
gaagaaacaagagagctacagtcgttagcggctgctgtggtgccatctgcccagacccttaaaattactgactttagcttcagtgactttgagctgtctgatctggaaacagcactgtgtacaattcggatgtttactgacctcaaccttgtgcagaacttccagatgaaacatgaggttctttgcagatggattttaagtgttaagaagaattatcggaagaatgttgcctatcataattggagacatgcctttaatacagctcggtgcatgtttgctgctctaaaagcaggcaaaattcagaacaagctgactgacctggagatacttgcattgctgattgctgcactaagccacggtttggatcaccgtggtgtgaataactcttacatacagcgaagtgaacatccacttgcccagctttactgccattcaatcatggaacaccatcattttgaccagtgcctgatgattcttaatagtccaggcaatcagattctcagtggcctctccattgaagaatataagaccacgttgaaaataatcaagcaagctattttagctacagacctagcactgtacattaagaggcgaggagaattttttgaacttataagaaacaatcaattcaatttggaagatcctcatcaaaaggagttgtttttggcaatgctgatgacagcttgtgatctttctgcaattacaaaaccctggcctattcaacaacggatagcagaacttgtagcaactgaattttttgatcaaggagacagagagagaaaagaactcaacatagaacccactgatctaatgaacagggagaagaaaaacaaaatcccaagtatgcaagttgggttcatagatgccatctgcttgcaactgtatgaggccctgacccacgtgtcagaggactgtttccctttgctagatggctgcagaaagaacaggcagaaatggcaggcccttgcagaacagcag

SEQ ID NO: 8848 - DNA, 978 bp, Artificial Sequence
  source: /note="Description of Artificial Sequence: Synthetic Destabilizing Domain (DD)"
gaagaaacaagagagctacagtcgttagcggctgctgtggtgccatctgcccagacccttaaaattactgactttagcttcagtgactttgagctgtctgatctggaaacagcactgtgtacaattcggatgtttactgacctcaaccttgtgcagaacttccagatgaaacatgaggttctttgcagatggattttaagtgttaagaagaattatcggaagaatgttgcctatcataattggagacatgcctttaatacagctcagtgcatgtttgctgctctaaaagcaggcaaaattcagaacaagctgactgacctggagatacttgcattgctgattgctgcactaagccacgatttggatcaccgtggtgtgaataactcttacatacagcgaagtgaacatccacttacccagctttactgccattcaatcatggaacaccatcattttgaccagtgcctgatgattcttaatagtccaggcaatcagattctcagtggcctctccattgaagaatataagaccacgttgaaaataatcaagcaagctattttagctacagacctagcactgtacattaagaggcgaggagaattttttgaacttataagaaaaaatcaattcaatttggaagatcctcatcaaaaggagttgtttgtggcaatgctgatgacagcttgtgatctttctgcaattacaaaaccctggcctattcaacaacggatagcagaacttgtagcaactgaattttttgatcaaggagacagagagagaaaagaactcaacatagaacccactgatctaatgaacagggagaagaaaaacaaaatcccaagtatgcaagttgggttcatagatgccatctgcttgcaactgtatgaggccctgacccacgtgtcagaggactgtttccctttgctagatggctacagaaagaacaggcagaaatggcaggcccttgcagaacagcag

SEQ ID NO: 8849 - DNA, 978 bp, Artificial Sequence
  source: /note="Description of Artificial Sequence: Synthetic Destabilizing Domain (DD)"
gaagaaacaagagagctacagtcgttagcggctgctgtggtgccatctgcccagacccttaaaatcactgactttagcttcagtgactttgagctgtctgatctggaaacggcactgtgtacaattcggatgtttactgacctcaaccttgtgcagaacttccagatgaaacatgaggttctttgcagatggattttaagtgttaagaagaattatcggaagaatgttgcctatcataattggagacatgcctttaatacagctcagtgcatgtttgctgctctaaaagcaggcaaaattcagaacaagctgactgacctggagatacttgcattgctgattgctgcactaagccacgatttggatcaccgtggtgcgaataactcttacatacagcgaagtgaacatccacttgcccagctttactgccattcaatcatggaacaccatcattttgaccagtgcctgatgattcttaatagtccaggcaatcagattctcagtggcctctccattgaagaatataagaccacgttgaaaataatcaagcaagctattttagctacagacctagcactgtacattaagaggcgaggagaattttttgaacttataagaaaaaatcaattcaatttggaagatcctcatcaaaaggagttgtttttggcaatgctgatgacagcttgtgatctttctgcaattacaaaaccctggcctattcaacaacggatagcagaatttgtagcaactgaattttttgatcaaggagacagagagggaaaagaactcaacatagaacccactgatctaatgaacagggagaagaaaaacaaaatcccaagtatgcaagttgggttcatagatgccatccgcttgcaactgtatgaggccctgacccacgtgtcagaggactgtttccctttgctagatggctgcagaaagaacaggcagaaatggcaggcccttgcaggacagcag

SEQ ID NO: 8850 - DNA, 978 bp, Artificial Sequence
  source: /note="Description of Artificial Sequence: Synthetic Destabilizing Domain (DD)"
gaagaaacaagagagctacagtcgttagcggctgctgtggtgccatctgcccagacccttaaaattactgactttagcttcagtgactttgagctgtctgatctggaaacagcactgtgtacaattcggatgtttactgacctcaaccttgtgcagaacttccagatgaaacatgaggttctttgcagatggattttaagtgttaagaagaattatcggaagaatgttgcctatcataattggagacatgcctttaatacagctcagtgcatgtttgctgctctaaaagcaggcaaaattcagaacaagctgactgacctggggatacttgcattgctgattgctgcactaagccacgatttggatcaccgtggtgtgaataactcttacatacagcgaagtgaacatccacttgcccagctttactgccattcaatcatggaacaccatcattttgaccagtgcctgatgattcttaatagtccagacaatcagattctcagtggcctctccattgaagaatataagaccacgttgaaaataatcaagcaagctattttagctacagacctagcactgtacattaagaggcgaggagaattttttgaacttataagaaaaaatcaattcaatttggaagatcctcatcaaaaggagttgtttttggcaatgctgatgacagcttgtgatctttctgcaattacaaaaccctggcctattcaacaacggatagcagaacttgtagcaactgaattttttgatcaaggagacagagagagaaaagagctcaacatagaacccactgatctaatgaacagggagaagaaaaacaaaaccccaagtatgcaagttgggttcatagatgccatctgcttgcaactgtatgaggccctgacccacgtgtcagaggactgtttccctttgctagatggctgcagaaagaacaggcagaaatggcaggcccttgcagaacagcag

SEQ ID NO: 8851 - DNA, 1710 bp, Artificial Sequence
  source: /note="Description of Artificial Sequence: Synthetic Construct"
atggtgagcaagggcgccgagctgttcaccggcatcgtgcccatcctgatcgagctgaatggcgatgtgaatggccacaagttcagcgtgagcggcgagggcgagggcgatgccacctacggcaagctgaccctgaagttcatctgcaccaccggcaagctgcctgtgccctggcccaccctggtgaccaccctgagctacggcgtgcagtgcttctcacgctaccccgatcacatgaagcagcacgacttcttcaagagcgccatgcctgagggctacatccaggagcgcaccatcttcttcgaggatgacggcaactacaagtcgcgcgccgaggtgaagttcgagggcgataccctggtgaatcgcatcgagctgaccggcaccgatttcaaggaggatggcaacatcctgggcaataagatggagtacaactacaacgcccacaatgtgtacatcatgaccgacaaggccaagaatggcatcaaggtgaacttcaagatccgccacaacatcgaggatggcagcgtgcagctggccgaccactaccagcagaatacccccatcggcgatggccctgtgctgctgcccgataaccactacctgtccacccagagcgccctgtccaaggaccccaacgagaagcgcgatcacatgatctacttcggcttcgtgaccgccgccgccatcacccacggcatggatgagctgtacaagggatccgaagaaacaagagagctacagtcgttagcggctgctgtggtgccatctgcccagacccttaaaattactgactttagcttcagtgactttgagctgtctgatctagaaacagcactgtgtacaattcggatgtttactgacctcaaccttgtgcagaacttccagatgaaacatgaggttctttgcagatggattttaagtgttaagaagaattatcggaagaatgttgcctatcataattggagacatgcctttaatacagctcagtgcatgtttgctgctctaaaagcaggcaaaattcagaacaagctgactgacctggagatacttgcattgctgattgctgcactaagccacgatttggatcaccgtggtgtgaataactcttacatacagcgaagtggacatccacttgcccagctttactgccattcaatcatggaacaccatcattttgaccagtgcctgatgattcttaatagtccaggcaatcagactctcagtggcctctccattgaagaatataagaccacgttgaaaataatcaagcaagctattttagctacagacctagcactgtacattaagaggcgaggagaattttttgaacttataagaaaaaatcaattcaatttggaagatcctcatcaaaaggagttgtttttggcaatgctgatgacagcttgtgatctttctgcaattacaaaaccctggcctattcaacaacggatagcagaacttgtagcaactgaattttttgatcaaggagacagagagagaaaagaactcaacatagaacccactgatctaatgaacagggagaagaaaaacaaaatcccaagtatgcaagttgggttcatagacgccatctgcttgcaactgtatgaggccctgacccacgtgtcagaggactgtttccctttgctagatggctgcagaaagaacaggcagaaatggcaggcccttgcagaacagcagtctagataa

SEQ ID NO: 8852 - DNA, 1710 bp, Artificial Sequence
  source: /note="Description of Artificial Sequence: Synthetic Construct"
atggtgagcaagggcgccgagctgttcaccggcatcgtgcccatcctgatcgagctgaatggcgatgtgaatggccacaagttcagcgtgagcggcgagggcgagggcgatgccacctacggcaagctgaccctgaagttcatctgcaccaccggcaagctgcctgtgccctggcccaccctggtgaccaccctgagctacggcgtgcagtgcttctcacgctaccccgatcacatgaagcagcacgacttcttcaagagcgccatgcctgagggctacatccaggagcgcaccatcttcttcgaggatgacggcaactacaagtcgcgcgccgaggtgaagttcgagggcgataccctggtgaatcgcatcgagctgaccggcaccgatttcaaggaggatggcaacatcctgggcaataagatggagtacaactacaacgcccacaatgtgtacatcatgaccgacaaggccaagaatggcatcaaggtgaacttcaagatccgccacaacatcgaggatggcagcgtgcagctggccgaccactaccagcagaatacccccatcggcgatggccctgtgctgctgcccgataaccactacctgtccacccagagcgccctgtccaaggaccccaacgagaagcgcgatcacatgatctacttcggcttcgtgaccgccgccgccatcacccacggcatggatgagctgtacaagggatccgaagaaacaagagagctacagtcgttagcggctgctgtggtgccatctgcccagacccttaaaattactgactttagcttcagtgactttgagctgtctgatctggaaacagcactgtgtacaattcggatgtttactgacctcaaccttgtgcagaacttccagatgaaacatgaggttctttgcagatggattttaagtgttaagaagaattatcggaagaatgttgcctatcataattggagacatgcctttaatacagctcagtgcatgtttgctgctctaaaagcaagcaaaattcagaacaagctgactgacctggagatacttgcattgctgactgctgcactaagccacgatttggatcaccgtggtgtgaataactcttacatacagcgaagtgaacatccacttgcccagctttactgccactcaatcatggaacaccatcattttgaccagtgcctgatgattcttaatagtccaggcaatcagattctcagtggcctctccattgaagaatataagaccacgttgaaaataatcaagcaagctattttagctacagacctagcactgtacattaagaggcgaggagaattttttgaacttataagaaaaaatcaattcaatttggaagatcctcatcaaaaggagttgtttttggcaatgctgatgacagcttgtgatctttctgcaattacaaaaccctggcctattcaacaacggatagcagaacttgtagcaactgaattttttgatcaaggagacagagagagaaaagaactcaacatagaacccactgatctaatgaacagggagaagaaaaacaaaatcccaagtatgcaagttgggttcatagatgccatctgcttgcaactgtatgaggccctgacccacgtgtcagaggactgtttccctttgctagatggctgcagaaagaacaggcagaaatggcaggcccttgcagaacagcagtctagataa

SEQ ID NO: 8853 - DNA, 1452 bp, Artificial Sequence
  source: /note="Description of Artificial Sequence: Synthetic Construct"
atggtgagcaagggcgccgagctgttcaccggcatcgtgcccatcctgatcgagctgaatggcgatgtgaatggccacaagttcagcgtgagcggcgagggcgagggcgatgccacctacggcaagctgaccctgaagttcatctgcaccaccggcaagctgcctgtgccctggcccaccctggtgaccaccctgagctacggcgtgcagtgcttctcacgctaccccgatcacatgaagcagcacgacttcttcaagagcgccatgcctgagggctacatccaggagcgcaccatcttcttcgaggatgacggcaactacaagtcgcgcgccgaggtgaagttcgagggcgataccctggtgaatcgcatcgagctgaccggcaccgatttcaaggaggatggcaacatcctgggcaataagatggagtacaactacaacgcccacaatgtgtacatcatgaccgacaaggccaagaatggcatcaaggtgaacttcaagatccgccacaacatcgaggatggcagcgtgcagctggccgaccactaccagcagaatacccccatcggcgatggccctgtgctgctgcccgataaccactacctgtccacccagagcgccctgtccaaggaccccaacgagaagcgcgatcacatgatctacttcggcttcgtgaccgccgccgccatcacccacggcatggatgagctgtacaagggatccgaagaaacaagagagctacagtcgttagcggctgctgtggtgccatctgcccagacccttaaaattactgactttagcttcagtgactttgagctgtctgatctggaaacagcactgtgtacaattcggatgtttactgacctcaaccttgtgcagaacttccagatgaaacatgaggttctttgcagatggattttaagtgttaagaagaattatcggaagaatgttgcctatcataattggagacatgcctttaatacagctcagtgcatgtttgctgctctaaaagcaggcaaaattcagaacaagctgactgacctggagatacttgcatcgctgattgctgcactaagccacgatttggatcaccgtggtgtgaataactcttacatacagcgaagtgaacatccacttgcccagctttactgccattcaatcatggaacaccatcattttgaccagtgcctgatgattcttaatagtccaggcaaccagattctcagtggcctctccattgaagaatataagaccacgttgaaaataatcaagcaagctattttagctacagacctagcactgtacattaagaggcgaggagaattttttgaacttataagaaaaaatcaattcaatttggaagatcctcatcaaaaggagttgtttttggcaatgctgatgacagcttgtgatctttctgcaattacaaaaccctggcctatttctagataa

SEQ ID NO: 8854 - DNA, 1710 bp, Artificial Sequence
  source: /note="Description of Artificial Sequence: Synthetic Construct"
atggtgagcaagggcgccgagctgttcaccggcatcgtgcccatcctgatcgagctgaatggcgatgtgaatggccacaagttcagcgtgagcggcgagggcgagggcgatgccacctacggcaagctgaccctgaagttcatctgcaccaccggcaagctgcctgtgccctggcccaccctggtgaccaccctgagctacggcgtgcagtgcttctcacgctaccccgatcacatgaagcagcacgacttcttcaagagcgccatgcctgagggctacatccaggagcgcaccatcttcttcgaggatgacggcaactacaagtcgcgcgccgaggtgaagttcgagggcgataccctggtgaatcgcatcgagctgaccggcaccgatttcaaggaggatggcaacatcctgggcaataagatggagtacaactacaacgcccacaatgtgtacatcatgaccgacaaggccaagaatggcatcaaggtgaacttcaagatccgccacaacatcgaggatggcagcgtgcagctggccgaccactaccagcagaatacccccatcggcgatggccctgtgctgctgcccgataaccactacctgtccacccagagcgccctgtccaaggaccccaacgagaagcgcgatcacatgatctacttcggcttcgtgaccgccgccgccatcacccacggcatggatgagctgtacaagggatccgaagaaacaagagagctacagtcgttagcggctgctgtggtgccatctgcccagacccttaaaattactgactttagcttcagtgactttgagctgtctgatctggaaacagcactgtgtacaattcggatgtttactgacctcaaccttgtgcagaacttccagatgaaacatgaggttctttgcagatggattttaagtgttaagaagaattatcggaagaatgttgcctatcataattggagacatgcctttaatacagctcagtgcatgtttgctgctctaaaagcaggcaaaattcagaacaagctgactgacctggagatacttgcattgctgattgctgcactaagccacgatttggatcaccgtggtgtgaataactcttacatacagcgaagtgaacatccacttgcccagctttactgccattcaatcatggaacaccatcattttgaccagtgcctgatgattcttaatagtccaggcaatcagattctcagtggcctctccattgaagaatataagaccacgttgaaaataatcaagcaagctattttagctacagacctagcactgtacattaagaggcgaggagaattttttgaacttataagaaaaaatcaattcaatttggaagatcctcatcaaaaggagttgtttttggcaatgctgatgacagtttgtgatctttctgcaattacaaaaccctggcctattcaacaacggatagcagaacttgtagcaactgaattttttgatcaaggagacagagagagaaaagaactcaacatagaacccactgatctaatgaacagggagaagaaaaacaaaatcccaagtatgcaagttgggttcatagatgccatctgcttgcaactgtatgaggccctgacccacgtgtcagaggactgtttccctttgctagatggctgcagaaagaacaggcagaaatggcaggcccttgcagaacagcagtctagataa

SEQ ID NO: 8855 - DNA, 1710 bp, Artificial Sequence
  source: /note="Description of Artificial Sequence: Synthetic Construct"
atggtgagcaagggcgccgagctgttcaccggcatcgtgcccatcctgatcgagctgaatggcgatgtgaatggccacaagttcagcgtgagcggcgagggcgagggcgatgccacctacggcaagctgaccctgaagttcatctgcaccaccggcaagctgcctgtgccctggcccaccctggtgaccaccctgagctacggcgtgcagtgcttctcacgctaccccgatcacatgaagcagcacgacttcttcaagagcgccatgcctgagggctacatccaggagcgcaccatcttcttcgaggatgacggcaactacaagtcgcgcgccgaggtgaagttcgagggcgataccctggtgaatcgcatcgagctgaccggcaccgatttcaaggaggatggcaacatcctgggcaataagatggagtacaactacaacgcccacaatgtgtacatcatgaccgacaaggccaagaatggcatcaaggtgaacttcaagatccgccacaacatcgaggatggcagcgtgcagctggccgaccactaccagcagaatacccccatcggcgatggccctgtgctgctgcccgataaccactacctgtccacccagagcgccctgtccaaggaccccaacgagaagcgcgatcacatgatctacttcggcttcgtgaccgccgccgccatcacccacggcatggatgagctgtacaagggatccgaagaaacaagagagctacagtcgttagcggctgctgtggtgccatctgcccagacccttaaaattactgactttagcttcagtgactttgagctgtctgatctggaaacagcactgtgtacaattcggatgtttactgacctcaaccttgtgcagaacttccagatgaaacatgaggttctttgcagatggattttaagtgttaagaagaattaccggaagaatgttgcctatcataattggagacatgcctttaatacagctcagtgcatgttcgctgctctaaaagcaggcaaaattcagaacaagctgactaacctggagatacttgcattgctgattgctgcactaagccacgatttggatcaccgtggtgtgaataactcttacatacagcgaagtgaacatccacttgcccagctttactgccattcaatcatggaacaccatcattttgaccagtgcctgatgattcttaatagtccaggcaatcagattctcagtggcctctccattgaagaatataagaccacgttgaaaataatcaagcaagctattttagctacagacctagcactgtacattaagaggcgaggagaattttttgaacttataagaaaaaatcaattcaatttggaagatcctcatcaaaaggagttgtttttggcaatgctgatgacagcttgtgatctttctgcaattacaaaaccctggcctattcaacaacggatagcagaacttgtagcaactgaattttttgatcaaggagacagagagagaaaagaactcaacatagaacccactgatctaatgaacagggagaagaaaaacaaaatcccaagtatgcaagttgggttcatagatgccatctgcttgcaactgtatgaggccctaacccacgtgtcagaggactgtttccctttgctagatggctgcagaaagaacaggcagaaatggcaggcccttgcagaacagcagtctagataa

SEQ ID NO: 8856 - DNA, 1710 bp, Artificial Sequence
  source: /note="Description of Artificial Sequence: Synthetic Construct"
atggtgagcaagggcgccgagctgttcaccggcatcgtgcccatcctgatcgagctgaatggcgatgtgaatggccacaagttcagcgtgagcggcgagggcgagggcgatgccacctacggcaagctgaccctgaagttcatctgcaccaccggcaagctgcctgtgccctggcccaccctggtgaccaccctgagctacggcgtgcagtgcttctcacgctaccccgatcacatgaagcagcacgacttcttcaagagcgccatgcctgagggctacatccaggagcgcaccatcttcttcgaggatgacggcaactacaagtcgcgcgccgaggtgaagttcgagggcgataccctggtgaatcgcatcgagctgaccggcaccgatttcaaggaggatggcaacatcctgggcaataagatggagtacaactacaacgcccacaatgtgtacatcatgaccgacaaggccaagaatggcatcaaggtgaacttcaagatccgccacaacatcgaggatggcagcgtgcagctggccgaccactaccagcagaatacccccatcggcgatggccctgtgctgctgcccgataaccactacctgtccacccagagcgccctgtccaaggaccccaacgagaagcgcgatcacatgatctacttcggcttcgtgaccgccgccgccatcacccacggcatggatgagctgtacaagggatccgaagaaacaagagagctacagtcgttagcggctgctgtggtgccatctgcccagacccttaaaattactgactttagcttcagtgactttgagctgtctgatctggaaacagcactgtgtacaattcggatgtttactgacctcaaccttgtgcagaacttccagatgaaacatgaggttctttgcagatggattttaagtgttaagaagaattatcggaagaatgttgcctatcataattggagacatgcctttaatacagctcagtgcatgtttgctgctctaaaagcaggcaaaattcagagcaagctgactgacctggagatacttgcattgctgattgctgcactaagccacgatttggatcaccgtggtgtgaataactcttacatacagcgaagtgagcatccacttgcccagctttactgccattcaatcatggaacaccatcattttgaccagtgcctgatgattcttaatagtccaggcaatcagattctcagtggcctctccattgaagaatataagaccacgttgaaaataatcaagcaagctattttagctacagacctagcactgtacattaagaggcgaggagaattttttgaacttataagaaaaaatcaattcaatttggaagatcctcatcaaaaggagttgtttttggcaatgctgatgacagcttgtgatctttctgcaattacaaaaccctggcctattcaacaacggatagcagaacttgtagcaactgaattttttgatcaaggagacagagagagaaaagaactcaacatagaacccactgatctaatgaacagggagaagaaaaacaaaatcccaagtatgcaagttgggttcatagatgccatctgcttgcaactgtatgaggccctgacccacgtgtcagaggactgtttccctttgctagatggctgcagaaagaacaggcagaaatggcaggcccttgcagaacagcagtctagataa

SEQ ID NO: 8857 - DNA, 1710 bp, Artificial Sequence
  source: /note="Description of Artificial Sequence: Synthetic Construct"
atggtgagcaagggcgccgagctgttcaccggcatcgtgcccatcctgatcgagctgaatggcgatgtgaatggccacaagttcagcgtgagcggcgagggcgagggcgatgccacctacggcaagctgaccctgaagttcatctgcaccaccggcaagctgcctgtgccctggcccaccctggtgaccaccctgagctacggcgtgcagtgcttctcacgctaccccgatcacatgaagcagcacgacttcttcaagagcgccatgcctgagggctacatccaggagcgcaccatcttcttcgaggatgacggcaactacaagtcgcgcgccgaggtgaagttcgagggcgataccctggtgaatcgcatcgagctgaccggcaccgatttcaaggaggatggcaacatcctgggcaataagatggagtacaactacaacgcccacaatgtgtacatcatgaccgacaaggccaagaatggcatcaaggtgaacttcaagatccgccacaacatcgaggatggcagcgtgcagctggccgaccactaccagcagaatacccccatcggcgatggccctgtgctgctgcccgataaccactacctgtccacccagagcgccctgtccaaggaccccaacgagaagcgcgatcacatgatctacttcggcttcgtgaccgccgccgccatcacccacggcatggatgagctgtacaagggatccgaagaaacaagagagctacagtcgttagcggctgctgtggtgccatctgcccagacccttaaaattactgactttagcttcagtgactttgagctgtctgatctggaaacagcactgtgtacaattcggatgtttactgacctcaaccttgtgcagaacttccagatgaaacatgaggttctttgcagatggattttaagtgttaagaagaattatcggaagaatgttgcctatcataattggagacatgcctttaatacagctcggtgcatgtttgctgctctaaaagcaggcaaaattcagaacaagctgactgacctggagatacttgcattgctgattgctgcactaagccacggtttggatcaccgtggtgtgaataactcttacatacagcgaagtgaacatccacttgcccagctttactgccattcaatcatggaacaccatcattttgaccagtgcctgatgattcttaatagtccaggcaatcagattctcagtggcctctccattgaagaatataagaccacgttgaaaataatcaagcaagctattttagctacagacctagcactgtacattaagaggcgaggagaattttttgaacttataagaaacaatcaattcaatttggaagatcctcatcaaaaggagttgtttttggcaatgctgatgacagcttgtgatctttctgcaattacaaaaccctggcctattcaacaacggatagcagaacttgtagcaactgaattttttgatcaaggagacagagagagaaaagaactcaacatagaacccactgatctaatgaacagggagaagaaaaacaaaatcccaagtatgcaagttgggttcatagatgccatctgcttgcaactgtatgaggccctgacccacgtgtcagaggactgtttccctttgctagatggctgcagaaagaacaggcagaaatggcaggcccttgcagaacagcagtctagataa

SEQ ID NO: 8858 - DNA, 1710 bp, Artificial Sequence
  source: /note="Description of Artificial Sequence: Synthetic Construct"
atggtgagcaagggcgccgagctgttcaccggcatcgtgcccatcctgatcgagctgaatggcgatgtgaatggccacaagttcagcgtgagcggcgagggcgagggcgatgccacctacggcaagctgaccctgaagttcatctgcaccaccggcaagctgcctgtgccctggcccaccctggtgaccaccctgagctacggcgtgcagtgcttctcacgctaccccgatcacatgaagcagcacgacttcttcaagagcgccatgcctgagggctacatccaggagcgcaccatcttcttcgaggatgacggcaactacaagtcgcgcgccgaggtgaagttcgagggcgataccctggtgaatcgcatcgagctgaccggcaccgatttcaaggaggatggcaacatcctgggcaataagatggagtacaactacaacgcccacaatgtgtacatcatgaccgacaaggccaagaatggcatcaaggtgaacttcaagatccgccacaacatcgaggatggcagcgtgcagctggccgaccactaccagcagaatacccccatcggcgatggccctgtgctgctgcccgataaccactacctgtccacccagagcgccctgtccaaggaccccaacgagaagcgcgatcacatgatctacttcggcttcgtgaccgccgccgccatcacccacggcatggatgagctgtacaagggatccgaagaaacaagagagctacagtcgttagcggctgctgtggtgccatctgcccagacccttaaaattactgactttagcttcagtgactttgagctgtctgatctggaaacagcactgtgtacaattcggatgtttactgacctcaaccttgtgcagaacttccagatgaaacatgaggttctttgcagatggattttaagtgttaagaagaattatcggaagaatgttgcctatcataattggagacatgcctttaatacagctcagtgcatgtttgctgctctaaaagcaggcaaaattcagaacaagctgactgacctggagatacttgcattgctgattgctgcactaagccacgatttggatcaccgtggtgtgaataactcttacatacagcgaagtgaacatccacttacccagctttactgccattcaatcatggaacaccatcattttgaccagtgcctgatgattcttaatagtccaggcaatcagattctcagtggcctctccattgaagaatataagaccacgttgaaaataatcaagcaagctattttagctacagacctagcactgtacattaagaggcgaggagaattttttgaacttataagaaaaaatcaattcaatttggaagatcctcatcaaaaggagttgtttgtggcaatgctgatgacagcttgtgatctttctgcaattacaaaaccctggcctattcaacaacggatagcagaacttgtagcaactgaattttttgatcaaggagacagagagagaaaagaactcaacatagaacccactgatctaatgaacagggagaagaaaaacaaaatcccaagtatgcaagttgggttcatagatgccatctgcttgcaactgtatgaggccctgacccacgtgtcagaggactgtttccctttgctagatggctacagaaagaacaggcagaaatggcaggcccttgcagaacagcagtctagataa

SEQ ID NO: 8859 - DNA, 1710 bp, Artificial Sequence
  source: /note="Description of Artificial Sequence: Synthetic Construct"
atggtgagcaagggcgccgagctgttcaccggcatcgtgcccatcctgatcgagctgaatggcgatgtgaatggccacaagttcagcgtgagcggcgagggcgagggcgatgccacctacggcaagctgaccctgaagttcatctgcaccaccggcaagctgcctgtgccctggcccaccctggtgaccaccctgagctacggcgtgcagtgcttctcacgctaccccgatcacatgaagcagcacgacttcttcaagagcgccatgcctgagggctacatccaggagcgcaccatcttcttcgaggatgacggcaactacaagtcgcgcgccgaggtgaagttcgagggcgataccctggtgaatcgcatcgagctgaccggcaccgatttcaaggaggatggcaacatcctgggcaataagatggagtacaactacaacgcccacaatgtgtacatcatgaccgacaaggccaagaatggcatcaaggtgaacttcaagatccgccacaacatcgaggatggcagcgtgcagctggccgaccactaccagcagaatacccccatcggcgatggccctgtgctgctgcccgataaccactacctgtccacccagagcgccctgtccaaggaccccaacgagaagcgcgatcacatgatctacttcggcttcgtgaccgccgccgccatcacccacggcatggatgagctgtacaagggatccgaagaaacaagagagctacagtcgttagcggctgctgtggtgccatctgcccagacccttaaaatcactgactttagcttcagtgactttgagctgtctgatctggaaacggcactgtgtacaattcggatgtttactgacctcaaccttgtgcagaacttccagatgaaacatgaggttctttgcagatggattttaagtgttaagaagaattatcggaagaatgttgcctatcataattggagacatgcctttaatacagctcagtgcatgtttgctgctctaaaagcaggcaaaattcagaacaagctgactgacctggagatacttgcattgctgattgctgcactaagccacgatttggatcaccgtggtgcgaataactcttacatacagcgaagtgaacatccacttgcccagctttactgccattcaatcatggaacaccatcattttgaccagtgcctgatgattcttaatagtccaggcaatcagattctcagtggcctctccattgaagaatataagaccacgttgaaaataatcaagcaagctattttagctacagacctagcactgtacattaagaggcgaggagaattttttgaacttataagaaaaaatcaattcaatttggaagatcctcatcaaaaggagttgtttttggcaatgctgatgacagcttgtgatctttctgcaattacaaaaccctggcctattcaacaacggatagcagaatttgtagcaactgaattttttgatcaaggagacagagagggaaaagaactcaacatagaacccactgatctaatgaacagggagaagaaaaacaaaatcccaagtatgcaagttgggttcatagatgccatccgcttgcaactgtatgaggccctgacccacgtgtcagaggactgtttccctttgctagatggctgcagaaagaacaggcagaaatggcaggcccttgcaggacagcagtctagataa

SEQ ID NO: 8860 - DNA, 1710 bp, Artificial Sequence
  source: /note="Description of Artificial Sequence: Synthetic Construct"
atggtgagcaagggcgccgagctgttcaccggcatcgtgcccatcctgatcgagctgaatggcgatgtgaatggccacaagttcagcgtgagcggcgagggcgagggcgatgccacctacggcaagctgaccctgaagttcatctgcaccaccggcaagctgcctgtgccctggcccaccctggtgaccaccctgagctacggcgtgcagtgcttctcacgctaccccgatcacatgaagcagcacgacttcttcaagagcgccatgcctgagggctacatccaggagcgcaccatcttcttcgaggatgacggcaactacaagtcgcgcgccgaggtgaagttcgagggcgataccctggtgaatcgcatcgagctgaccggcaccgatttcaaggaggatggcaacatcctgggcaataagatggagtacaactacaacgcccacaatgtgtacatcatgaccgacaaggccaagaatggcatcaaggtgaacttcaagatccgccacaacatcgaggatggcagcgtgcagctggccgaccactaccagcagaatacccccatcggcgatggccctgtgctgctgcccgataaccactacctgtccacccagagcgccctgtccaaggaccccaacgagaagcgcgatcacatgatctacttcggcttcgtgaccgccgccgccatcacccacggcatggatgagctgtacaagggatccgaagaaacaagagagctacagtcgttagcggctgctgtggtgccatctgcccagacccttaaaattactgactttagcttcagtgactttgagctgtctgatctggaaacagcactgtgtacaattcggatgtttactgacctcaaccttgtgcagaacttccagatgaaacatgaggttctttgcagatggattttaagtgttaagaagaattatcggaagaatgttgcctatcataattggagacatgcctttaatacagctcagtgcatgtttgctgctctaaaagcaggcaaaattcagaacaagctgactgacctggggatacttgcattgctgattgctgcactaagccacgatttggatcaccgtggtgtgaataactcttacatacagcgaagtgaacatccacttgcccagctttactgccattcaatcatggaacaccatcattttgaccagtgcctgatgattcttaatagtccagacaatcagattctcagtggcctctccattgaagaatataagaccacgttgaaaataatcaagcaagctattttagctacagacctagcactgtacattaagaggcgaggagaattttttgaacttataagaaaaaatcaattcaatttggaagatcctcatcaaaaggagttgtttttggcaatgctgatgacagcttgtgatctttctgcaattacaaaaccctggcctattcaacaacggatagcagaacttgtagcaactgaattttttgatcaaggagacagagagagaaaagagctcaacatagaacccactgatctaatgaacagggagaagaaaaacaaaaccccaagtatgcaagttgggttcatagatgccatctgcttgcaactgtatgaggccctgacccacgtgtcagaggactgtttccctttgctagatggctgcagaaagaacaggcagaaatggcaggcccttgcagaacagcagtctagataa

SEQ ID NO: 8861 - protein, 326 aa, Artificial Sequence
  source: /note="Description of Artificial Sequence: Synthetic Destabilizing Domain (DD)"
EETRELQSLAAAVVPSAQTLKITDFSFSDFELSDLETALCTIRMFTDLNLVQNFQMKHEVLCRWILSVKKNYRKNVAYHNWRHAFNTAQCMFAALKAGKIQNKLTDLEILALLIAALSHDLDHRGVNNSYIQRSEHPLAQLYCHSIMEHHHFDQCLMILNSPGNQILSGLSIEEYKTTLKIIKQAILATDLALYIKRRGEFFELIRKNQFNLEDPHQKELFLATLMTACDLSAITKPWPIQQRIAELVATEFFDQGDRERKELNIEPTDLMNREKKNKIPSMQVGFIDAICLQLYEALTHVSEDCFPLLDGCRKNRQKWQALAEQQ

SEQ ID NO: 8862 - protein, 326 aa, Artificial Sequence
  source: /note="Description of Artificial Sequence: Synthetic Destabilizing Domain (DD)"
EETRELQSLAAAVVPSAQTLKITDFSFSDFELSDLETALCTIRMFTDLNLVQNFQMKHEVLCRWILSVKKNYRKNVAYHNWRHAFNTAQCMFAALKAGKIQNKLTDLEILALLIAALSHDLDHRGVNNSYIQRSEHPLAQLYCHSIMEHHHFDQCLMILNSPGNQILSGLSIEEYKTTLKIIKQAILATDLALYIKRRGEFFELIRKNQFNLEDPHQEELFLAMLMTACDLSAITKPWPIQQRIAELVATEFFDQGDRERKELNIEPTDLMNREKKNKIPSMQVGFIDAICLQLYEALTHVSEDCFPLLDGCRKNRQKWQALAEQQ

SEQ ID NO: 8863 - protein, 326 aa, Artificial Sequence
  source: /note="Description of Artificial Sequence: Synthetic Destabilizing Domain (DD)"
EETRELQSLAAAVVPSAQTLKITDFSFSDFELSDLETALCTIRMFTDLNLVQNFQMKHEVLCRWILSVKKNYRKNVAYHNWRHAFNTAQCMFAALKAGKIQNKLTDLEILALLIAALSHDLDHRGVNNSYIQRSEHPLAQLYYHSIMEHHRFDQCLMILNSPGNQILSGLSIEEYKTTLKIIKQAILVTDLALYIKRRGEFFELIRKNQFNLEDPHQKELFLAMLMTACDLSAITKPWPIQQRIAELVATEFFDQGDRERKELNIEPTDLMNREKKNKIPSMQVGFIDAICLQLYEALTHVSEDCFPLLDGCRKNRQKWQALAEQQ

SEQ ID NO: 8864 - protein, 326 aa, Artificial Sequence
  source: /note="Description of Artificial Sequence: Synthetic Destabilizing Domain (DD)"
EETRELQSLAAAVVPSAQTLKITDFSFSDFELSDLETALCTIRMFTDLNLVQNFQMKHEVLCRWILSVKKNYRKNVAYHNWRHAFNTAQCMFAALKAGKIQNKLSDLEILALLIAALSHDLDHRGVNNSYIQRSEHPLAQLYCHSIMEHHHFDQCLMILNSPGNQILSGLSIEEYKTTLKIIKQAILATDLALYIKRRGEFFELIRKNQFNLEDPHQKELFLAMLMTACDLSAITKPWPIQQRIAELVATEFFDQGDRERKELNIEPTDLMNREKKNKIPSRQVGFIDAICLQLYEALTHVSEDCFPLLDGCRKNRQKWQALAEQQ

SEQ ID NO: 8865 - protein, 326 aa, Artificial Sequence
  source: /note="Description of Artificial Sequence: Synthetic Destabilizing Domain (DD)"
EEARELQSLAAAVVPSAQTLKITGFSFSDFELSDLETALCTIRMFTDLNLVQNFQMKHEVLCRWILSVKKNYRKNVAYHNWRHAFNTAQCMFAALKAGKIQNKLTDLEILALLIAALSHDLDHRGVNNSYIQRSEHPLAQLYCHSIMEHHHFDQCLMILNSPGNQILSGLSTEEYKTTLKIIKQAILATDLALYIKRRGEFFELIRKNQLNLEDPHQKELFLAMLMTACNLSAITKPWPIQQRIAELVATEFFDQGDRERKELNIEPTDLMNREKKNKIPSMQVGFIDAICLQLYEALTHVSEDCFPLLDGCRKNRQKWQALAEQQ

SEQ ID NO: 8866 - protein, 326 aa, Artificial Sequence
  source: /note="Description of Artificial Sequence: Synthetic Destabilizing Domain (DD)"
EETRELQSLAAAVVPSAQTLKITDFSFSDFELSDLETALCTIRMFTDLNLVRNFQMKHEVLCRWILSVKKNYRKNVAYHNWRHAFNTAQCMFAALKAGKIQNKLTDLEILALLIAALSHDLDHRGVNNSYIQRSEHPLAQLYCHSIMEHHHFDQCLMILNSPGNQILSGLSIEEYKTTLKIIKQAILATGLALYIKRRGEFFELIRKNQFNLEDPHQKELFLAMLMTACDLSAITKPWPIQQRIAELVATEFFDQGDRERKELNIEPTDLMNREKKNKIPSMQVGFIDAICLQLYEALTHVSEDCFPLLDGCRKNRQKWQALAEQQ

SEQ ID NO: 8867 - protein, 326 aa, Artificial Sequence
  source: /note="Description of Artificial Sequence: Synthetic Destabilizing Domain (DD)"
EETRELQSLAAAVVPSAQTLKITDFSFSDFELSDLETALCTIRMFTDLNLVQNFQMKHEVLCRWILSVKKNYRKNVAYHNWRHAFNTAQCMFAALKAGKIQNKLTDLEILALLIAALSHDLDHRGVNNSYIQRSEHPLAQLYCHSIMEHHHSDQCLMILNSPGNQILSGLSIEEYKTTLKIIKQAILATDLALYIKRRGEFFELIRKNQFNLEDPHQKELFLAMLMTACDLSAITKPWPIQQRIAELVATEFFDQGDRERKELNIEPTDLMNREKKNKIPSMQVGFIDAICLQLYEALTHVSEDCFPLLDGCRKNRQKWQALAEQQ

SEQ ID NO: 8868 - protein, 326 aa, Artificial Sequence
  source: /note="Description of Artificial Sequence: Synthetic Destabilizing Domain (DD)"
EETRGLQSLAAAVVPSAQTLKITDFSFSDFELSDLETALCTIRMFTDLNLVQNFQMKHEVLCRWILSVKKNYRKNVAYHNWRHAFNTAQCMFAALKAGKIQNKLTDLEILALLIAALSHDLDHRGVNNSYIQRSEHPLAQLYCHSIMEHHHFDQCLMILNSPGNQILSGLSIEEYKTTLKIIKQAILATDLALYIKRRGEFFEIIRKNQFNLEDPHQKELFLAMLMTACDLSAITKPWPIQQRIAELVATEFFDQGDRERKELNIEPTDLMNREKKNKIPSMQVGFIDAICLQLYEALTHVSEDCFPLLDGCRKNRQKWQALAEQQ

SEQ ID NO: 8869 - protein, 326 aa, Artificial Sequence
  source: /note="Description of Artificial Sequence: Synthetic Destabilizing Domain (DD)"
EETRELQSLAAAVVPSAQTLKITDFSFSDFELSDLETALCTIRMFTDLNLVQNFQMKHEVLCRWILSVKKNYRKNVAYHNWRHAFNTAQCMFAALKAGKIRNKLTDLEILALLIAALSHDLDHRGVNNSYIQRSEHPLAQLYCHSIMEHHHFDQCLMILNSPGNQILSGLSIEEYKTTLKIIKQAILATDLALYIKRRGEFFELIRKNQFNLEDPHQKKLFLAMLMTACDLSAITKPWPIQQRIAELVATEFFDQGDRERKELNIEPTDLMNREKKNKTPSMQVGFIDAICLQLYEALTHVSEDCFPLLDGCRKNRQKWQALAEQQ

SEQ ID NO: 8870 - protein, 326 aa, Artificial Sequence
  source: /note="Description of Artificial Sequence: Synthetic Destabilizing Domain (DD)"
EETRELQSLAAAVVPSAQTLKITDFSFSDFELSDLETALCTIRMFTDLNLVQNFQMKHEVLCRWILSVKKNYRKNVAYHNWRHAFNTAQCMFAALKAGKIQNKLTDLEILALLIAALSHDLDHRGVNNSYIQRSEHPPAQLYCHSIMEHHHFDQCLMILNSPGNQILSGLSIEEYKTTLKIIKQAILATDLALYIKRRGEFFELIRKNQFNLEDPHQKELFLAMLMTACDLSAITKPWPIQQRIAELVATEFFDQGDRERKELNIEPTDLMNREKKNKIPSMQVGFIDAICLQLYEALTHVLEDCFPLLDGCRKNRQKWQALAEQQ

SEQ ID NO: 8871 - protein, 326 aa, Artificial Sequence
  source: /note="Description of Artificial Sequence: Synthetic Destabilizing Domain (DD)"
EETRELQSLAAAVVPSAQTLKITDFSFSDFELSDLETALCTIRMFTDLNLVQNFQMKHEVLCRWILSVKKNYRKNVAYHNWRHAFNTAQCMFAALKAGKIQNKLTDLEILALLIAALSHDLDHRGVNNSYIQRSEHPLAQLYCHSIMEHHHFDQCLTILNSPGNQILSGLSIEEYKTTLKIIKQAILATDLALYIKRRGEFFELIRKNQFNLEDPHQKELFLAMLMTACNLSAITKPWPIQQRIAELVATEFFDQGDRERKELNIEPTDLMNREKKNKIPSMQVGFIDAICLQLYEALTHVSEDCFPLLDGCRKNRQKWQALAEQQ

SEQ ID NO: 8872 - protein, 326 aa, Artificial Sequence
  source: /note="Description of Artificial Sequence: Synthetic Destabilizing Domain (DD)"
EETRELQSLAAAVVPSAQTLKITDFSFSDFELSDLETALCTIRMFTDLNLVQNFQMKHEVLCRWILSVKKNYRKNVAYHNWRHAFNTAQCMFAALKAGKIQNKLTDLEILALLIAALSHDLDHRGVNNSYIQRSEHPLAQLYCHSIMEHHHFDQCLMILNSPGNQILSGLSIEEYKTTLKIIKQAILATDLALYIKRRGEFFELIRKNQFNLEDPHQKELFLAMLMTACDLSAITKPWPIQQRIAELVATEFFDQGDRERKELNIEPTDLMNGEKKNKIPSMQVGFIDAICLQLYEALTHVSEDCFPLLDGCRKNRQKWQALAEQQ

SEQ ID NO: 8873 - protein, 326 aa, Artificial Sequence
  source: /note="Description of Artificial Sequence: Synthetic Destabilizing Domain (DD)"
EETRELQSLAAAVVPSAQTLKITDFSFSDFELSDLETALCTIQMFTDLNLVQNFQMKHEVLRRWILSVKKNYRKNVAYHNWRHAFNTAQCMFAALKAGKIQNKLTDLEILALLIAALSHDLDHRGANNSYIQRSEHPLAQLYCHSIMEHHHFDQCLMILNSPGNQILSGLSIEEYKTTLKVIKQAILATDLALYIKRRGEFFELIRKNQFNLEDPHQKELFLAMLMTACDLSAITKPWPIQQRIAELVATKFFDQGDRERKELNIEPTDLMNREKKNKIPSMQVGFIDAICLQLYEALTHVSEDCFPLLDGCRKNRQKWQAPAEQQ

SEQ ID NO: 8874 - protein, 326 aa, Artificial Sequence
  source: /note="Description of Artificial Sequence: Synthetic Destabilizing Domain (DD)"
EETRELQSLAAAVVPSAQTLKITDFSFSDFELSDLETALCTIRMFTDLNLVQNFQMKHEVLCRWILSVKKNYRKNVAYHNWRHAFNTAQCMFAALKAGKIQNKLTDLEILALLIAALSHDLDHRGVNNSYIQRSEHPLAQLYCHSIMEHHHFDQCLMILNSPGNQILSGLSIEEYKTTLKIIKQAVLATDLALYIKRRGEFFELIRKNQFNLEDPHQKELFLAMLMTACDLSAITKPWPIQQRIAELVATEFFDQGDRERKELNIEPTDLMNREKKNKIPSMQVGSIDAICLQLYEALTHVSEDCFPLLDGCRKNRQKWQALAEQQ

SEQ ID NO: 8875 - protein, 326 aa, Artificial Sequence
  source: /note="Description of Artificial Sequence: Synthetic Destabilizing Domain (DD)"
EETRELQSLAAAVVPSAQTLKITDFSFSDFELSDLETALCTIRMFTDLNLVQNFQMKHEVLCRWILSVKKNYRKNVAYHNWRHAFNTAQCMFAALKAGKIQNKLTDLEILALLIAALSHDLDHRGVNNSYIQRSEHPLAQLYCHSIMEHHHFDQCLMILNGPGNQILSGLSIKEYKTTLKIIKQAILATDLALYIKRRGEFFELMRKNQFNLEDPHQKELFLAMLMTARDLSAITKPWPIQQRIAELVATEFFDQGDRERKELNIEPTDLMNREKKNKIPSMQVGFIDAICLQLYEALTHVSEDCFPLLDGCRKNRQKWQALAEQQ

SEQ ID NO: 8876 - protein, 326 aa, Artificial Sequence
  source: /note="Description of Artificial Sequence: Synthetic Destabilizing Domain (DD)"
EETRELQSLAAAVVPSAQTLKITDFSFSDFELSDLETALCTIRMFTDLNLVQNFQMKHEVLCRWILSVKKNYRKNVAYHNWRHAFNTAQCMFAALKAGKIQNKLTDLEILALLIAALSHDLDHRGVNNSYIQRSEHPLAQLYCHSIMEHHHFDQCLMILNSPGNQILSGLSIEEHKTTLKIIKQAILATDLALYIKRRGEFFELIRKNQFNLEDPHQKELFLAMLMTACDLSAITKPWPIQQRIAELVATEFFDQGDRERKELNIEPTDLMNREKKNRIPSMQVGFIDAICLQLYEAPTHVSEDCFPLLDGCRKNRQKWQALAEQQ

SEQ ID NO: 8877 - protein, 326 aa, Artificial Sequence
  source: /note="Description of Artificial Sequence: Synthetic Destabilizing Domain (DD)"
EETRELQSLAAAVVPSAQTLKITDFSFSDFELSDLETALCTIRMFTDLSLVQNFQMKHEVLCRWILSVKKNYRKNVAYHNWRHAFNTAQCMFAALKAGKIQNKLTDLEILALLIAALSHDLDHRGVNNSYIQRSEHPLAQLYCHSIMEHHHFDQCLMILNSPGNQILSGLSIEEYKTTLKIIKQAILATDLALYIKRRGEFFELIRKNQFNLEDPHQEELFLAMLMTACDLSAITKPWPIQQRIAELVATEFFDQGDRERKELNIEPTDLMNREKKNKIPSMQVGFIDAICLQLYEALTHVSEDCFPLLDGSRKNRQKWQALAEQQ

SEQ ID NO: 8878 - protein, 326 aa, Artificial Sequence
  source: /note="Description of Artificial Sequence: Synthetic Destabilizing Domain (DD)"
EETRELQSLAAAVVPSAQTLKITDFSFSDFELSDLETALCTIRMFTDLNLVQNFQMKHEVLCRWILSVKKNYRKNVAYHNWRHAFNTAQCMFAALKAGKIQNKLTDLEILALLIAALSHDLDHRGVNNSYIQRSEHPLAQLYCHSIMGHHHFDQCLMILNSPGNQILSGLSIEEYKTTLKIIKQAILATDLALYIKRRGEFFELIRKNQFNLENPHQKELFLAMLMTACDLSAITKPWPIQQRIAELVATEFFDQGDRERKELNIEPTDLMNREKKNKIPSMQVGFIDAICLQLYEALTHVSEDCFPLLDGCRKNRQKWQALAEQQ

SEQ ID NO: 8879 - protein, 326 aa, Artificial Sequence
  source: /note="Description of Artificial Sequence: Synthetic Destabilizing Domain (DD)"
EETRELQSLAAAVVPSAQTLKITDFSFSDFELSDLETALCTIRMFTDLNLVQNFQMRHEVLCRWILSVKKNYRKNVAYHNWRHAFNTAQCMFAALKAGKIQNKLTDLETLALLIAALSHDLDHRGVNNSYIQRSEHPLAQLYCHSIMEHHHFDQCLMILNSPGNQILSGLSIEEYKTTLKIIKQAILATDLALYIKRRGEFFELIRKNQFNLEDPHQKELFLAMLMTACDLSAITKPWPIQQRIAELVATEFFDQGDRERKELNIEPTDLMNREKKNKIPSMQVGFIDAICLQLYEALTHVSEDCFPLLDGCRKNRQKWQAPAEQQ

SEQ ID NO: 8880 - protein, 326 aa, Artificial Sequence
  source: /note="Description of Artificial Sequence: Synthetic Destabilizing Domain (DD)"
EETRELQSLAAAVVPSAQTLKITDFSFSDFELSDLETALCTIRMFTDLNLVQNFQMKHEVLCRWILSVKKNYRKNVAYHNWRHASNTAQCMFAALKAGKIQNKLTDLEILALLIAALSHDLDHRGVNNSYIQRSEHPLAQLYCHSIMEHHHFDQCLMILNSPGNQILSGLSIEEYKTTLKIIKQAILATDLALYIKRRGEFFELIRKNQFNLEDPHQKELFLAMLMTACDLSAITKPWPIQQRIAELVATEFFDQGDRERKELNIEPTDLMNREKKNKIPSMQAGFIDAICLQLCEALTHVSEDCFPLLDGCRKNRQKWQALAEQQ

SEQ ID NO: 8881 - protein, 326 aa, Artificial Sequence
  source: /note="Description of Artificial Sequence: Synthetic Destabilizing Domain (DD)"
EETRELQSLAAAVEPSAQTLKITDFSFSDFELSDLETALCTIRMFTDLNLVQNFLMKHEVLCRWILSVKKNYRKNVAYHNWRHAFNTAQCMFAALKAGIIQNKLTDLEILALLIAALSHDLDHRGVNNSYIQRSEHPLAQLYCHSITEHHHFDQCLMILNSPGNQILIGLSIEEYKTTLKIIKQAILATDLALYIKRRGEFFELIRKNQFNLEDPHQEELFLAMLMTACDLSAITKPWPIQQRIAEPVATEFFDQGDRERKELNIEPTDLMNREKKNKIPSMQVGFIDAICLQLYEALTHVSEDCFPLLDGCRKNRQKWQALTEQQ

SEQ ID NO: 8882 - protein, 326 aa, Artificial Sequence
  source: /note="Description of Artificial Sequence: Synthetic Destabilizing Domain (DD)"
EETRELQSLAAAVVPSAQTLKITDFSFSDFELSDLETALCTIRMFTDLNLVQNFQMKHEVLCRWILSVKKNYRKNVAYHNWRHAFNTAQCMFAALKAGKIQNKLTDLEILALLIAALGHDLDHRGVNNSYIQRSEHPLAQLYCHSIMEHHHFDRCLMILNSPGNQILSGLSIEEYKTTLKIIKQAILATDLALYIKRRGEFFELIRKNQFNLEDPHQKELFLAMLMTACDLSAITKPWPIQQRIAELVATEFFDQGDRERKELNIEPTDLMNREKKNKIPSMQVGFIDAICLQLYEALTHVSEDCFPLLDGCRKNRQKWQALAEQQ

SEQ ID NO: 8883 - protein, 326 aa, Artificial Sequence
  source: /note="Description of Artificial Sequence: Synthetic Destabilizing Domain (DD)"
EETRELQSLAAAVVPSAQTLKITDFSFSDFGLSDLETALCTIRMFTDLNLVQNFQMKHEVLCRWILSVKKNYRKNVAYHNWRHAFNTAQCMFAALKAGKIQNKLTDLEILALLIAALSHDLDHRGVNNSYIQRSEHPLAQLYCHSIMEHHHFDQCLMILNSPGNQILSGLSIEEYKTTLKIIKQAILATDLALYIKRRGEFFELIRKNQFNLEDPHQKELFLAMLMTACDLSAITKPWPIQQRIAELVATEFFDQGDRERKELNIEPTDLMNREKKNKIPSMQVGFIDAICLQLYEALTHVSEDCFPLLDGCRKNRQKWQALAEQQ

SEQ ID NO: 8884 - protein, 326 aa, Artificial Sequence
  source: /note="Description of Artificial Sequence: Synthetic Destabilizing Domain (DD)"
EETRELQSLAAAVVPSAQTLKITDFSFSDFELSDLETALCTIRMFTDLNLVQNFQMKHEVLCRWILSVKKNYRKNVAYHNWRHAFNTAQCMFAALKAGKIQNKLTDLEILALLIAALSHDLDHRGVNNSYIQRSEHPLAQLYCHSIMEHHHFDQCLMILNSPGNQILSGLSIEEYKTTLKIIKQAILATDLALYIKRRGEFFELIRKNQFNLEDPHQKELFLAMLMTACDLSAITKPWPVQQRIAELVATEFFDQGDRERKELNIEPTDLMNREKKNKIPSMQVGFIDAICLQLYEALTHVSEDCFPLLDGCRKNRQKWQALAEQQ

SEQ ID NO: 8885 - protein, 326 aa, Artificial Sequence
  source: /note="Description of Artificial Sequence: Synthetic Destabilizing Domain (DD)"
EETRELQSLAAAVVPSAQTLKITDFSFSDFELSDLETALCTIRMFTDLNLVQNFQMRHEVLCRWILSVKKNYRKNVAYHNWRHAFNTAQCMFAALKAGKIQNKLTDLEILALLIAALSHDLDHRGVNNSYIQRSEHPLAQLYCHSIMEHHHFDQCLMILNSPGNQILSGLSIEEYKTTLKIIKQAILATDLALYIKRRGEFFELIRKNQFNLEDPHQKELFLAMLMTACDLSAITKPWPIQQRIAELVATEFFDQGDRERKELNIEPTDLMNREKKNKIPSMQVGFIDAICLQLYEALTHVSEDCFPLLDGCRKNRQKWQALAEQQ

SEQ ID NO: 8886 - protein, 326 aa, Artificial Sequence
  source: /note="Description of Artificial Sequence: Synthetic Destabilizing Domain (DD)"
EETRELQSLAAAVVPSAQTLKITDSSFSDFELSDLETALCTIRMFTDLNLVQNFQMKHEVLCRWILSVKKNYRKNVAYHNWRHAFNTAQCMFAALKAGKIQNKLTDLEILALLIAALSHDLDHRGVNNSYIQRSEHPLAQLYCHSIMEHHHFDQCLMILNSPGNQILSGLSIEECKTTLKIIKQAILATDLALYIKRRGEFFELIRKNQFNLEDPHQKELFLAMLTTACDLSAITKPWPIQQRIAELVATEFFDQGDRERKELNIEPTDLMNREKKNKIPSMQVGFIDAICLQLYEALTHVSEDCFPLLDGCRKNRQKWQALAEQQ

SEQ ID NO: 8887 - protein, 326 aa, Artificial Sequence
  source: /note="Description of Artificial Sequence: Synthetic Destabilizing Domain (DD)"
EETRELQSLAAAVVPSAQTLKITDFSFSDFELSDLETALCTIRMFTDLNLVQNFQMKHEVLCRWILSVKKNYRKNVAYHNWRHAFNTAQCMFAALKAGKIQNKLTDLEILALLIVTLSHDLDHRGVNNSYIQRSEHPLAQLYCHSIMEHHHFDQCLMILNSPGNQILSGLSIEEYKTTLKIIKQAILATDLALYIERRGEFFELIRKNQFNLEDPHQKELFLAMLMTACDLSAITKPWPIQQRIAELVATEFFDQGDRERKELNIEPTDLMNREKKNKIPSMQVGFIDAICLQLYKALTHVSEDCFPLLDGCRKNRQKWQALAEQQ

SEQ ID NO: 8888 - protein, 326 aa, Artificial Sequence
  source: /note="Description of Artificial Sequence: Synthetic Destabilizing Domain (DD)"
EETRELQSLAAAVVPSAQTLKITDFSFSDFELSDLETALCTIRMFTDLNLVQNFQMKHEVLCRWILSVKKNYRKNVAYHNWRHAFNTAQCMFAALKAGKIQNKLTDLEILALLIAALSHDLDHRGVNNSYIQRSEHPLAQLYCHSIMEHHHFDQCLMILNSPGNQILSGLSIEEYKTTLKIIKQAILATDLALCIKRRGEFFELIRKNQFNLEDPHQKELFLAMLMTACDLSAITKPWPIQQRIAELVATEFFDQGDRERKELNIEPTDLMNREKKNKIPSMRVGFIDAICLQLYEALTHVSEDCFPLLDGCRKNRQKWQALAEQQ

SEQ ID NO: 8889 - protein, 326 aa, Artificial Sequence
  source: /note="Description of Artificial Sequence: Synthetic Destabilizing Domain (DD)"
EETRELQSLAAAVVPSAQTLKITDFSFSDFELSDLETALCTIRMFTDLNLVQNFQMKHEVPCRWILSVKKNYRKNVAYHNWRHAFNTAQCMFAALKAGKIQNKLTDLEILALLIAALSHDLDHRGVNNSYIQRSEHPLAQLYCHSIMEHHHFDQCLMILNSPGNQILSGLSIEEYKTTLKIIKQAILATDLALYIKRRGEFFELIRRNQFNLEDPHQKELFLAMLMTACDLSAITKPWPIQQRIAELVATEFFDQGDRERKELNIEPTDLMNREKKNKIPSMQVGFIDAICLQLYEALTHVSEDCFPLLDGCRKNRQKWQALAEQQ

SEQ ID NO: 8890 - protein, 326 aa, Artificial Sequence
  source: /note="Description of Artificial Sequence: Synthetic Destabilizing Domain (DD)"
EETRELQSLAAAVVPSAQTLKITDFSFSDFELSDLETALCTIWMFTDLNLVQNFQMKHEVLCRWILSVKKNYRKNVAYHNRRHAFNTAQCMFAALKAGKIQNKLTDLEILALLIAALSHDLDHRGVNNSYIQRSEHPLAQLYCHSIMEHHHFDQCLMILNSPGNQILSGLSIEEYKTTLKIIKQAILATDLALYIKRRGEFFELIRKNQFNLEDPHQKELFLAMLMTACDLSAITKPWPIQQRIAELVATEFFDQGDRERKELNIEPTDLTNREKKNKIPSMQVGFVDAICLQLYEALTHVSEDCFPLLDGCRKNRQKWQALAEQQ

SEQ ID NO: 8891 - DNA, 978 bp, Artificial Sequence
  source: /note="Description of Artificial Sequence: Synthetic Destabilizing Domain (DD)"
gaagaaacaagagagctacagtcgttagcggctgctgtggtgccatctgcccagacccttaaaattactgactttagcttcagtgactttgagctgtctgatctggaaacagcactgtgtacaattcggatgtttactgacctcaaccttgtgcagaacttccagatgaaacatgaggttctttgcagatggattttaagtgttaagaagaattatcggaagaatgttgcctatcataattggagacatgcctttaatacagctcagtgcatgtttgctgccctaaaagcaggcaaaattcagaacaagctgactgacctggagatacttgcattgctgattgctgcactaagccacgatttggatcaccgtggtgtgaataactcttacatacagcgaagtgaacatccacttgcccagctttactgccattcaatcatggaacaccatcattttgaccagtgcctgatgattcttaatagtccaggcaatcagattctcagtggcctctccattgaagaatataagaccacgttgaaaataatcaagcaagctattttagctacagacctagcactgtacattaagaggcgaggagaattttttgaacttataagaaaaaatcaattcaatttggaagatcctcatcaaaaggagttgtttttggcaacgctgatgacagcttgtgatctttctgcaattacaaaaccctggcctattcaacaacgaatagcagaacttgtagcaactgaattttttgatcaaggagacagagagagaaaagaactcaacatagaacccactgatctaatgaacagggagaagaaaaacaaaatcccaagtatgcaagttgggttcatagatgccatctgcttgcaactgtatgaggccctgacccacgtgtcagaggactgtttccctttgctagatggctgcagaaagaacaggcagaaatggcaggcccttgcagaacagcag

SEQ ID NO: 8892 - DNA, 978 bp, Artificial Sequence
  source: /note="Description of Artificial Sequence: Synthetic Destabilizing Domain (DD)"
gaagaaacaagagagctacagtcgttagcggctgctgtggtgccatctgcccagacccttaaaattactgactttagcttcagtgactttgagctgtctgatctggaaacagcactgtgtacaattcggatgtttactgacctcaaccttgtgcagaacttccagatgaaacatgaggttctttgcagatggattttaagtgttaagaagaattatcggaagaatgttgcctatcataattggagacatgcctttaatacagctcagtgcatgtttgctgctctaaaagcaggcaaaattcagaacaagctgactgacctggagatacttgcattgctgattgctgcactaagccacgatttggatcaccgtggtgtgaataactcttacatacagcgaagtgaacatccacttgcccagctttactgccattcaatcatggaacaccatcattttgaccagtgcctgatgattcttaatagtccaggcaatcagattctcagtggcctctccattgaagaatataagaccacgttgaaaataatcaagcaagctattttagctacagacctagcactgtacattaagaggcgaggagaattttttgaacttataagaaaaaatcaattcaatttggaagatcctcatcaagaggagttgtttttggcaatgctgatgacagcttgtgatctttctgcaattacaaaaccctggcctattcaacaacggatagcagaacttgtagcaactgaattttttgatcaaggagacagagagagaaaagaactcaacatagaacccactgatctaatgaacagggagaagaaaaacaaaatcccgagtatgcaagttgggttcatagatgccatctgcttgcaactgtatgaggccctgacccacgtgtcagaggactgtttccctttgctagatggctgcagaaagaacaggcagaaatggcaggcccttgcagaacagcag

SEQ ID NO: 8893 - DNA, 978 bp, Artificial Sequence
  source: /note="Description of Artificial Sequence: Synthetic Destabilizing Domain (DD)"
gaagaaacaagagagctacagtcgttagcggctgctgtggtgccatctgcccagacccttaaaattactgactttagcttcagtgactttgagctgtctgatctggaaacagcattgtgtacaattcggatgtttactgacctcaaccttgtgcagaacttccagatgaaacatgaggttctttgcagatggattttaagtgttaagaagaattatcggaagaatgttgcctatcataattggagacatgcctttaatacagctcagtgcatgtttgctgctctaaaagcaggcaaaattcagaacaagctgactgacctggagatacttgcattgttgattgctgcactaagccacgatttggatcaccgtggtgtgaataactcttacatacagcgaagtgaacatccacttgcccagctttactaccattcaatcatggaacaccatcgttttgaccagtgcctgatgattcttaatagtccaggcaatcagattctcagtggcctctccattgaagaatataagaccacgttgaaaataatcaagcaagctattttagttacagacctagcactgtacattaagaggcgaggagaattttttgaacttataagaaaaaatcaattcaatttggaagatcctcatcaaaaggagttgtttttggcaatgctgatgacagcttgtgatctttctgcaattacaaaaccctggcctattcaacaacggatagcagaacttgtagcaactgaattttttgatcaaggagacagagagagaaaagaactcaacatagaacccactgatctaatgaacagggagaagaaaaacaaaatcccaagtatgcaagttgggttcatagatgccatctgcttgcaactgtatgaggccctgacccacgtgtcagaggactgtttccctttgctagatggctgcagaaagaacaggcagaaatggcaggcccttgcagaacagcag

SEQ ID NO: 8894 - DNA, 978 bp, Artificial Sequence
  source: /note="Description of Artificial Sequence: Synthetic Destabilizing Domain (DD)"
gaagaaacaagagagctacagtcgttagcggctgctgtggtgccatctgcccagacccttaaaattactgactttagcttcagtgactttgagctgtctgatctggaaacagcactgtgtacaattcggatgtttactgacctcaaccttgtgcagaacttccagatgaaacatgaggttctttgcagatggattttaagtgttaagaagaattatcggaagaatgttgcctatcataattggagacatgcctttaatacagctcagtgcatgtttgctgctctaaaagcaggcaaaattcagaacaagctgtctgacctggagatacttgcattgctgattgctgcactaagccacgatttggatcaccgtggtgtgaataactcttacatacagcgaagtgaacatccacttgcccagctttactgccattcaatcatggaacaccatcattttgaccagtgcctgatgatccttaatagtccaggcaatcagattctcagtggcctctccattgaagaatataagaccacgttgaaaataatcaagcaagctattttagctacagacctagcgctgtacattaagaggcgaggagaattttttgaacttataagaaaaaatcaattcaatttggaagatcctcatcagaaggagttgtttttggcaatgctgatgacagcttgtgatctttctgcaattacaaaaccctggcctattcaacaacggatagcagaacttgtagcaactgaattttttgatcaaggagacagagagagaaaagaactcaacatagaacccactgatctaatgaacagggagaagaaaaacaaaatcccaagtaggcaagttgggttcatagatgccatctgcttgcaactgtatgaggccctgacccacgtgtcagaggactgtttccctttgctagatggctgcagaaagaacaggcagaaatggcaggcccttgcagaacagcag

SEQ ID NO: 8895 - DNA, 978 bp, Artificial Sequence
  source: /note="Description of Artificial Sequence: Synthetic Destabilizing Domain (DD)"
gaagaagcaagagagctacagtcgttagcggctgctgtggtgccatctgcccagacccttaaaattactggctttagcttcagtgactttgagctgtctgatctggaaacagcactgtgtacaattcggatgtttactgacctcaaccttgtgcagaacttccagatgaaacatgaggttctttgcagatggattttaagtgttaagaagaattatcggaagaatgttgcctatcataattggagacatgcctttaatacagctcagtgcatgtttgctgctctaaaagcaggcaaaattcagaacaagctgactgacctggagatacttgcattgctgattgctgcactaagccacgatttggatcaccgtggtgtgaataactcttacatacagcgaagtgaacatccacttgcccagctttactgccattcaatcatggaacaccatcattttgaccagtgcctgatgattcttaatagtccaggcaatcagattctcagtggcctctccactgaagaatataagaccacgttgaaaataatcaagcaagctattttagctacagacctagcactgtacattaagaggcgaggagaattttttgaacttataagaaaaaatcaactcaatttggaagatcctcatcaaaaggagttgtttttggcaatgctgatgacagcttgcaatctttctgcaattacaaaaccctggcctattcaacaacggatagcagaacttgtagcaactgaattttttgatcaaggagacagagagagaaaagaactcaacatagaacccactgatctaatgaacagggagaagaaaaacaaaatcccaagtatgcaagttgggttcatagatgccatctgcttgcagctgtatgaggccctgacccacgtgtcagaggactgtttccctttgctagatggctgcagaaagaacaggcagaaatggcaggcccttgcagaacagcag

SEQ ID NO: 8896 - DNA, 978 bp, Artificial Sequence
  source: /note="Description of Artificial Sequence: Synthetic Destabilizing Domain (DD)"
gaagaaacaagagagctacagtcgttagcggctgctgtggtgccatctgcccagacccttaaaattactgactttagcttcagtgactttgagctgtctgatctggaaacagcactgtgtacaattcggatgtttactgacctcaaccttgtgcggaacttccagatgaaacatgaggttctttgcagatggattttaagtgttaagaagaattatcggaagaatgttgcctatcataattggagacatgcctttaatacagctcagtgcatgtttgctgctctaaaagcaggcaaaattcagaacaagctgactgacctggagatacttgcattgctgattgctgcactaagccacgatttggatcaccgtggtgtgaataactcttacatacagcgaagtgaacatccacttgcccagctttactgccattcaatcatggaacaccatcattttgaccagtgcctgatgattcttaatagtccaggcaatcagattctcagtggcctctccattgaagaatataagaccacgttgaaaataatcaagcaagctattttagctacaggcctagcactgtacattaagaggcgaggagaattttttgaacttataagaaaaaatcaattcaatttggaagatcctcatcaaaaggagttgtttttggcaatgctgatgacagcttgtgatctttctgcaattacaaaaccctggcctattcaacaacggatagcagaacttgtagcaactgaattttttgatcaaggagacagagagagaaaagaactcaacatagaacccactgatctaatgaacagggagaagaaaaacaaaatcccaagtatgcaagttgggttcatagatgccatctgcttgcaactgtatgaggccctgacccacgtgtcagaggactgtttccctttgctggatggctgcagaaagaacaggcagaaatggcaggcccttgcagaacagcag

SEQ ID NO: 8897 - DNA, 978 bp, Artificial Sequence
  source: /note="Description of Artificial Sequence: Synthetic Destabilizing Domain (DD)"
gaagaaacaagagagctacagtcgttagcggctgctgtggtgccatctgcccagacccttaaaattactgactttagcttcagtgactttgagctgtctgatctggaaacagcactgtgtacaattcggatgtttactgacctcaaccttgtgcagaacttccagatgaaacatgaggttctttgcagatggattttaagtgttaagaagaattatcggaagaatgttgcctatcataattggagacatgcctttaatacagctcagtgcatgtttgctgctctaaaagcaggcaaaattcagaacaagctgactgacctggagatacttgcattgctgattgctgcactaagccacgatttggatcaccgtggtgtgaataactcttacatacagcgaagtgaacatccacttgcccagctttactgccattcaatcatggaacaccatcattctgaccagtgcctgatgattcttaatagtccaggcaatcagattctcagtggcctctccattgaagaatataagaccacgttgaaaataatcaagcaagctattttagctacagacctagcactgtacattaagaggcgaggagaattttttgaacttataagaaaaaatcaattcaatttggaagatcctcatcaaaaggagttgtttttggcaatgctgatgacagcttgtgatctttctgcaattacaaaaccctggcctattcaacaacggatagcagaacttgtagcaactgaattttttgatcaaggagacagagagagaaaagaactcaacatagaacccactgatctaatgaacagggagaagaaaaacaaaatcccaagtatgcaagttgggttcatagatgccatctgcttgcaactgtatgaggccctgacccacgtgtcagaggactgtttccctttgctagatggctgcagaaagaacaggcagaaatggcaggcccttgcagaacagcag

SEQ ID NO: 8898 - DNA, 978 bp, Artificial Sequence
  source: /note="Description of Artificial Sequence: Synthetic Destabilizing Domain (DD)"
gaagaaacaagagggctacagtcgttagcggctgctgtggtgccatctgcccagacccttaaaattactgactttagcttcagtgactttgagctgtctgatctggaaacagcactgtgtacaattcggatgtttactgacctcaaccttgtgcagaacttccagatgaaacatgaggttctttgcagatggattttaagtgttaagaagaattatcggaagaatgttgcctatcataattggagacatgcctttaatacagctcagtgcatgtttgctgctctaaaagcaggcaaaattcagaacaagctgactgacctggagatacttgcattgctgattgctgcactaagccacgatttggatcaccgtggtgtgaataactcttacatacagcgaagtgaacatccacttgcccagctttactgccattcaatcatggaacaccatcattttgaccagtgcctgatgattcttaatagtccaggcaatcagattctcagtggcctctccattgaagaatataagaccacgttgaaaataatcaagcaagctattttagctacagacctagcactgtacattaagaggcgaggagaattttttgaaattataagaaaaaatcaattcaatttggaagatcctcatcaaaaggagttgtttttggcaatgctgatgacagcttgtgatctttctgcaattacaaaaccctggcctattcaacaacggatagcagaacttgtagcaaccgaattttttgatcaaggagacagagagagaaaagaactcaacatagaacccactgatctaatgaacagggagaagaaaaacaaaatcccaagtatgcaagttgggttcatagatgccatctgcttgcaactgtatgaggccctgacccacgtgtcagaggactgtttccctttgctagatggctgcaggaagaacaggcagaaatggcaggcccttgcagaacagcag

SEQ ID NO: 8899 - DNA, 978 bp, Artificial Sequence
  source: /note="Description of Artificial Sequence: Synthetic Destabilizing Domain (DD)"
gaagaaacaagagagctacagtcgttagcggctgctgtggtgccatctgcccagacccttaaaattactgactttagcttcagtgactttgagctgtctgatctggaaacagcactgtgtacaattcggatgtttactgacctcaaccttgtgcagaacttccagatgaaacatgaggttctttgcagatggattttaagtgttaagaagaattatcggaagaatgttgcctatcataattggagacatgcctttaatacagctcagtgcatgtttgctgctctaaaagcaggcaaaattcggaacaagctgactgacctggagatacttgcattgctgattgctgcactaagccacgatttggatcaccgtggtgtgaataactcttacatacagcgaagtgaacatccacttgcccagctttactgccattcaatcatggaacaccatcattttgaccagtgcctgatgattcttaatagtccaggcaatcagattctcagtggcctctccattgaagaatataagaccacgttgaaaataatcaagcaagctattttagctacagacctagcactgtacattaagaggcgaggagaattttttgaacttataagaaaaaatcaattcaatttggaagatcctcatcaaaagaagttgtttttggcaatgctgatgacagcttgtgatctttctgcaattacaaaaccctggcctattcaacaacggatagcagaacttgtagcaactgaattttttgatcaaggagacagagagagaaaagaactcaacatagaacccactgatctaatgaacagggagaagaaaaacaaaaccccaagtatgcaagttgggttcatagatgccatctgcttgcaactgtatgaggccctgacccacgtgtcagaggactgtttccctttgctagatggctgcagaaagaacaggcagaaatggcaggcccttgcagaacagcag

SEQ ID NO: 8900 - DNA, 978 bp, Artificial Sequence
  source: /note="Description of Artificial Sequence: Synthetic Destabilizing Domain (DD)"
gaagaaacaagagagctacagtcgttagcggctgccgtggtgccatctgcccagacccttaaaattactgactttagcttcagtgactttgagctgtctgatctggaaacagcactgtgtacaattcggatgtttactgacctcaaccttgtgcagaacttccagatgaaacatgaggttctttgcagatggattttaagtgttaagaagaattatcggaagaatgttgcctatcataattggagacatgcctttaatacagctcagtgcatgtttgctgctctaaaagcaggcaaaattcagaacaagctaactgacctggagatacttgcattgctgattgctgcactaagccacgatttggatcaccgtggtgtgaataactcttacatacagcgaagtgaacatccacctgcccagctttactgccattcaatcatggaacaccatcattttgaccagtgcctgatgattcttaatagtccaggcaatcagattctcagtggcctctccattgaagaatataagaccacgttgaaaataatcaagcaagctattttagctacagacctagcactgtacattaagaggcgaggagaattttttgaacttataagaaaaaatcaattcaatttggaagatcctcatcaaaaggagttgtttttggcaatgctgatgacagcttgtgatctttctgcaattacaaaaccctggcctattcaacaacggatagcagaacttgtagcaactgaattttttgatcaaggagacagagagagaaaagaactcaacatagaacccactgatctaatgaacagggagaagaaaaacaaaatcccaagtatgcaagttgggttcatagatgccatctgcttgcaactgtatgaggccctgacccacgtgttagaggactgtttccctttgctagatggctgcagaaagaacaggcagaaatggcaggcccttgcagaacagcag

SEQ ID NO: 8901 - DNA, 978 bp, Artificial Sequence
  source: /note="Description of Artificial Sequence: Synthetic Destabilizing Domain (DD)"
gaagaaacaagagagctacagtcgttagcggctgctgtggtgccatctgcccagacccttaaaattactgactttagcttcagtgactttgagctgtctgatctggaaacagcactgtgtacaattcggatgtttactgacctcaaccttgtgcagaacttccagatgaaacatgaggttctttgcagatggattttaagtgttaagaagaattatcggaagaatgttgcctatcataattggagacatgcctttaatacagctcagtgcatgtttgctgctctaaaagcaggcaaaattcagaacaagctgactgacctggagatacttgcattgctgattgctgcactaagccacgatttggatcaccgtggtgtgaataactcttacatacagcgaagtgaacatccacttgcccagctttactgccattcaatcatggaacaccatcattttgaccagtgcctgacgattcttaatagtccaggcaatcagattctcagtggcctctccattgaagaatataagaccacgttgaaaataatcaagcaagctattttagctacagacctagcactgtacattaagaggcgaggagagttttttgaacttataagaaaaaatcaattcaatttggaagatcctcatcaaaaggagttgtttttggcaatgctgatgacagcttgtaatctttctgcaattacaaaaccctggcctattcaacaacggatagcagaacttgtagcaactgaattttttgatcaaggagacagagagagaaaagaactcaacatagaacccactgatctaatgaacagggagaagaaaaacaaaatcccaagtatgcaagttgggttcatagatgccatctgcttgcaactgtatgaggccctgacccacgtgtcagaggactgtttccctttgctagatggctgcagaaagaacaggcagaaatggcaggcccttgcagaacagcag

SEQ ID NO: 8902 - DNA, 978 bp, Artificial Sequence
  source: /note="Description of Artificial Sequence: Synthetic Destabilizing Domain (DD)"
gaagaaacaagagagctacagtcgttagcggctgctgtggtgccatctgcccagacccttaaaattactgactttagcttcagtgactttgagctgtctgatctggaaacagcactgtgtacaattcggatgtttactgacctcaaccttgtgcagaacttccagatgaaacatgaggttctttgcagatggattttaagtgttaagaagaattatcggaagaatgttgcctatcataattggagacatgcctttaatacagctcagtgcatgtttgctgctctaaaagcaggcaaaattcagaacaagctgactgacctggagatacttgcattgctgatcgctgcactaagccacgatttggatcaccgtggtgtgaataactcttacatacagcgaagtgaacatccacttgcccagctttactgccattcaatcatggaacaccatcattttgaccagtgcctgatgattcttaatagtccaggcaatcagattctcagtggcctctccattgaagaatataagaccacgttgaaaataatcaagcaagctattttagctacagacctagcactgtacattaagaggcgaggagaattttttgaacttataagaaaaaatcaattcaatttggaagatcctcatcaaaaggagttgtttttggcaatgctgatgacagcttgtgatctttctgccattacaaaaccctggcctattcaacaacggatagcagaacttgtagcaactgaattttttgatcaaggagacagagagagaaaagaactcaacatagaacccactgatctaatgaacggggagaagaaaaacaagatcccaagtatgcaagttgggttcatagatgccatctgcttgcaactgtatgaggccctgacccacgtgtcagaggactgtttcccattgctagatggctgcagaaagaacaggcagaaatggcaggcccttgcagaacagcag

SEQ ID NO: 8903 - DNA, 978 bp, Artificial Sequence
  source: /note="Description of Artificial Sequence: Synthetic Destabilizing Domain (DD)"
gaagaaacaagagagctacagtcgttggcggctgctgtggtgccatctgcccagacccttaaaattactgactttagcttcagtgactttgagttgtctgatctggaaacagcactgtgtacaattcagatgtttactgacctcaaccttgtgcagaacttccagatgaaacatgaggttcttcgcagatggattttaagtgttaagaagaattatcggaagaatgttgcctatcataattggagacatgcctttaatacagctcagtgcatgtttgctgctctaaaagcaggcaaaattcagaacaagctgactgacctggagatacttgcattgctgattgctgcactaagccacgatttggatcaccgtggtgcgaataactcttacatacagcgaagtgaacatccacttgcccagctttactgccattcaatcatggaacaccatcattttgaccagtgcctgatgattcttaatagtccaggcaatcagattctcagtggcctctccattgaagaatataagaccacgttgaaagtaatcaagcaagctattttagctacagacctagcactgtacattaagaggcgaggagaattttttgaacttataagaaaaaatcaattcaatttggaagatcctcatcaaaaggagttgtttttggcaatgctgatgacagcttgtgatctttctgcaattacaaaaccctggcctattcaacaacggatagcagaacttgtagcaactaaattttttgatcaaggagacagagagagaaaagaactcaacatagaacccactgatctaatgaacagggagaagaaaaacaaaatcccaagtatgcaagttgggttcatagatgccatctgcttgcaactgtatgaggccctgacccacgtgtcagaggactgtttccctttgctagatggctgcagaaagaacaggcagaaatggcaggcccctgcagaacagcag

SEQ ID NO: 8904 - DNA, 978 bp, Artificial Sequence
  source: /note="Description of Artificial Sequence: Synthetic Destabilizing Domain (DD)"
gaagaaacaagagagctacagtcgttagcggctgctgtggtgccatctgcccagacccttaaaattactgactttagcttcagtgactttgagctgtctgatctggaaacagcactgtgtacaattcggatgtttactgacctcaaccttgtgcagaacttccagatgaaacatgaggttctttgcagatggattttaagtgttaagaagaattatcggaagaatgttgcctatcataattggagacatgcctttaatacagctcagtgcatgtttgctgctctaaaagcaggcaaaattcagaacaagctgactgacctggagatacttgcattgctgattgctgcactaagccacgacttggatcaccgtggtgtgaataactcttacatacagcgaagtgaacatccacttgcccagctttactgccattcaatcatggaacaccatcattttgaccagtgcctgatgattcttaatagtccaggcaatcagattctcagtggcctctccattgaagaatataagaccacgttgaaaataatcaagcaagctgttttagctacagacctagcactgtacattaagaggcgaggagaattttttgaacttataagaaaaaatcaattcaatttggaagatcctcatcaaaaggagttgtttttggcaatgctgatgacagcttgtgatctttctgcaattacaaaaccctggcctattcaacaacggatagcagaacttgtagcaactgaattttttgatcaaggagacagagagagaaaagaactcaacatagaacccactgatctaatgaacagggagaagaaaaacaaaatcccaagtatgcaagttgggtccatagatgccatctgcttgcaactgtatgaggccctgacccacgtgtcagaggactgtttccctttgctagatggctgcagaaagaacaggcagaaatggcaggcccttgcagaacagcag

SEQ ID NO: 8905 - DNA, 978 bp, Artificial Sequence
  source: /note="Description of Artificial Sequence: Synthetic Destabilizing Domain (DD)"
gaagaaacaagagagctacagtcgttagcggctgctgtggtgccatctgcccagacccttaaaattactgactttagcttcagtgactttgagctgtctgatctggaaacagcactgtgtacaattcggatgtttactgacctcaaccttgtgcagaacttccagatgaaacatgaggttctttgcagatggattttaagtgttaagaagaattatcggaagaatgttgcctatcataactggagacatgcctttaatacagctcagtgcatgtttgctgctctaaaagcaggcaaaattcagaacaagctgactgacctggagatacttgcattgctgattgctgcactaagccacgatttggatcaccgtggtgtgaataactcttacatacagcgaagtgaacatccacttgcccagctttactgccattcaatcatggaacaccatcattttgaccagtgcctgatgattcttaatggtccaggcaatcagattctcagtggcctctccattaaagaatataagaccacgttgaaaataatcaagcaagctattttagctacagacctagcactgtacattaagaggcgaggagaattttttgaacttatgagaaaaaatcaattcaatttggaagatcctcatcaaaaggagttgtttttggcaatgctgatgacagctcgtgatctttctgcaattacaaaaccctggcctattcaacaacggatagcagaacttgtagcaactgaattttttgatcaaggagacagagagagaaaagaactcaacatagaacccactgatctaatgaacagggagaagaaaaacaaaatcccaagtatgcaagttgggttcatagatgccatctgcttgcaactgtatgaggccctgacccacgtgtcagaggactgtttccctttgctagatggctgcagaaagaacaggcagaaatggcaggcccttgcagaacagcag

SEQ ID NO: 8906 - DNA, 978 bp, Artificial Sequence
  source: /note="Description of Artificial Sequence: Synthetic Destabilizing Domain (DD)"
gaagaaacaagagagctacagtcgttagcggctgctgtggtgccatctgcccagacccttaaaattactgactttagcttcagtgactttgagctgtctgatctggaaacagcactgtgtacaattcggatgtttactgacctcaaccttgtgcagaacttccagatgaaacatgaggttctttgcagatggattttaagtgttaagaagaattatcggaagaatgttgcctatcataattggagacatgcctttaatacagctcagtgcatgtttgctgctctaaaagcaggcaaaattcagaacaagctgactgacctggagatacttgcattgctgattgctgcactaagccacgatttggatcaccgtggtgtgaataactcttacatacagcgaagtgaacatccactcgcccagctttactgccattcaatcatggaacaccatcattttgaccagtgcctgatgattcttaatagtccaggcaatcagattctcagtggcctctccattgaagaacataagaccacgttgaaaataatcaagcaagctattttagctacagacctagcactgtacattaagaggcgaggagaattttttgaacttataagaaaaaatcaattcaatttggaagatcctcatcaaaaggagttgtttttggcaatgctgatgacagcttgtgatctttctgcaattacaaaaccctggcctattcaacaacggatagcagaacttgtagcaactgaattttttgatcaaggagacagagagagaaaagaactcaacatagaacccactgatctaatgaacagggagaagaaaaacagaatcccaagtatgcaagttgggttcatagatgccatctgcttgcaactgtatgaggccccgacccacgtgtcagaggactgtttccctttgctagatggctgcagaaagaacaggcagaaatggcaggcccttgcagaacagcag

SEQ ID NO: 8907 - DNA, 978 bp, Artificial Sequence
  source: /note="Description of Artificial Sequence: Synthetic Destabilizing Domain (DD)"
gaagaaacaagagagctacagtcgttagcggctgctgtggtgccatctgcccagacccttaaaattactgactttagcttcagtgactttgagctgtctgatctggaaacagcactgtgtacaattcggatgtttactgacctcagccttgtgcagaacttccagatgaaacatgaggttctttgcagatggattttaagtgttaagaagaattatcggaagaatgttgcctatcataattggagacatgcctttaatacagctcagtgcatgtttgctgctctaaaagcaggcaaaattcagaacaagctgactgacctggagatacttgcattgctgattgctgcactaagccacgatttggatcaccgtggtgtgaataactcttacatacagcgaagtgaacatccacttgcccagctttactgccattcaatcatggaacaccatcattttgaccagtgcctgatgattcttaatagtccaggcaatcagattctcagtggcctctccattgaagaatataagaccacgttgaaaataatcaagcaagctattttagctacagacctagcactatacattaagaggcgaggagaattttttgaacttataagaaaaaatcaattcaatttggaagatcctcatcaagaggagttgtttttggcaatgctgatgacagcttgtgatctttctgcaattacaaaaccctggcctattcaacaacggatagcagaacttgtagcaactgaattttttgatcaaggagacagagagagaaaagaactcaacatagaacccactgatctaatgaacagggagaagaaaaacaaaatcccaagtatgcaagttgggttcatagatgccatctgcttgcaactgtatgaggccctgacccacgtgtcagaggactgtttccctttgctagatggctccagaaagaacaggcagaaatggcaggcccttgcagaacagcag

SEQ ID NO: 8908 - DNA, 978 bp, Artificial Sequence
  source: /note="Description of Artificial Sequence: Synthetic Destabilizing Domain (DD)"
gaagaaacaagagagctacagtcgttagcggctgctgtggtgccatccgcccagacccttaaaattactgactttagcttcagtgactttgagctgtctgatctggaaacagcactgtgtacaattcggatgtttactgacctcaaccttgtgcagaacttccagatgaaacatgaggttctttgcagatggattttaagtgttaagaagaattatcggaagaatgttgcctatcataattggagacatgcctttaatacagctcagtgcatgtttgctgctctaaaagcaggcaaaattcagaacaagctgactgacctggagatacttgcattgctgattgctgcactaagccacgatttggatcaccgtggtgtgaataactcttacatacagcgaagtgaacatccacttgcccagctttactgccattcaattatgggacaccatcattttgaccagtgcctgatgattcttaatagtccaggcaatcagattctcagtggcctctccattgaagaatataagaccacgttgaaaataatcaagcaagctattttagctacagacctagcactgtacattaagaggcgaggagaattttttgaacttataagaaaaaatcaattcaatttggaaaatcctcatcaaaaggagttgtttttggcaatgctgatgacagcttgtgatctttctgcaattacaaaaccctggcctattcaacaacggatagcagaacttgtagcaactgaattttttgatcaaggagacagagagagaaaagaactcaacatagaacccactgatctaatgaacagggagaagaaaaacaaaatcccaagtatgcaagttgggttcatagatgccatctgcttgcaactgtatgaggccctgacccacgtgtcagaggactgtttccctttgctagatggctgcagaaagaacaggcagaaatggcaggcccttgcagaacagcag

SEQ ID NO: 8909 - DNA, 978 bp, Artificial Sequence
  source: /note="Description of Artificial Sequence: Synthetic Destabilizing Domain (DD)"
gaagaaacaagagagctacagtcgttagcggctgctgtggtgccatctgcccagacccttaaaattactgactttagcttcagtgactttgagctgtctgatctggaaacagcactgtgtacaattcggatgtttactgacctcaaccttgtgcagaacttccagatgagacatgaggttctttgcagatggattttaagtgttaagaagaattatcggaagaatgttgcctatcataattggagacatgcctttaatacagctcagtgcatgtttgctgctctaaaagcaggcaaaattcagaacaagctgactgacctggagacacttgcattgctgattgctgcactaagccacgatttggatcaccgtggtgtgaataactcttacatacagcgaagtgaacatccacttgcccagctttactgccattcaatcatggaacaccatcattttgaccagtgcctgatgattcttaatagtccaggcaatcagattctcagtggcctctccattgaagaatataagaccacgttgaaaataatcaagcaagctattttagctacagacctagcactgtacattaagaggcgaggagaattttttgaacttataagaaaaaatcaattcaatttggaagatcctcatcaaaaggagttgtttttggcaatgctgatgacagcttgtgatctttctgcaattacaaaaccctggcctattcaacaacggatagcagaacttgtagcaactgaattttttgatcaaggagacagagagagaaaagaactcaacatagaacccactgatctaatgaacagggagaagaaaaacaaaatcccaagtatgcaagttgggttcatagatgccatctgcttgcaactgtatgaggccctgacccacgtgtcagaggactgcttccctttgctagatggctgcagaaagaacaggcagaaatggcaggcccctgcagaacagcag

SEQ ID NO: 8910 - DNA, 978 bp, Artificial Sequence
  source: /note="Description of Artificial Sequence: Synthetic Destabilizing Domain (DD)"
gaagaaacaagagagctacagtcgttagcggctgctgtggtgccatctgcccagacccttaaaattactgactttagcttcagtgactttgagctgtctgatctggaaacagcactgtgtacaattcggatgtttactgacctcaaccttgtgcagaacttccagatgaaacatgaggttctttgcagatggattttaagtgttaagaagaattatcggaagaatgttgcctatcataactggagacatgcctctaatacagctcagtgcatgtttgctgctctaaaagcaggcaaaattcagaacaagctgactgacctggagatacttgcattgctgattgctgcactaagccacgatttggatcaccgtggtgtgaataactcttacatacagcgaagtgaacatccacttgcccagctttactgccattcaatcatggaacaccatcattttgaccagtgcctgatgattcttaatagtccaggcaatcagattctcagtggcctctccattgaagaatataagaccacgttgaaaataatcaagcaagctattttagctacagacctagcactgtacattaagaggcgaggagaattttttgaacttataagaaaaaatcaattcaatttggaagatcctcatcaaaaggagttgtttttggcaatgctgatgacagcttgtgatctttctgcaattacaaaaccctggcctattcaacaacggatagcagaacttgtagcaactgaattttttgatcaaggagacagagagagaaaagaactcaacatagaacccactgatctaatgaacagggagaagaaaaacaaaatcccaagtatgcaagctgggttcatagatgccatctgcttgcaactgtgtgaggccctgacccacgtgtcagaggactgtttccctttgctagatggctgcagaaagaacaggcagaaatggcaggcccttgcagaacagcag

SEQ ID NO: 8911 - DNA, 978 bp, Artificial Sequence
  source: /note="Description of Artificial Sequence: Synthetic Destabilizing Domain (DD)"
gaagaaacaagagagctacagtcgttagcggctgctgtggagccatctgcccagacccttaaaattactgactttagcttcagtgactttgagctgtctgatctggaaacagcactgtgtacaattcggatgtttactgacctcaaccttgtgcagaacttcctgatgaaacatgaggttctttgcagatggattttaagtgttaagaagaattatcggaagaatgttgcctatcataattggagacatgcctttaatacagctcagtgcatgtttgctgctctaaaagcaggcataattcagaacaagctgactgacctggagatacttgcattgctgattgctgcactaagccacgatttggatcaccgtggtgtgaataactcttacatacagcgaagtgaacatccacttgcccagctttactgccattcaatcacggaacaccatcattttgaccagtgcctgatgattcttaatagtccaggcaatcagattctcattggcctctccattgaagaatataagaccacgttgaaaataatcaagcaagctattttagctacagacctagcactgtacattaagaggcgaggagaattttttgaacttataagaaaaaatcaattcaatttggaagatcctcatcaagaggagttgtttttggcaatgctgatgacagcttgtgatctttctgcaattacaaaaccctggcctattcaacaacggatagcagaacctgtagcaactgaattttttgatcaaggagacagagagagaaaagaactcaacatagaacccactgatctaatgaacagggagaagaaaaacaaaatcccaagtatgcaagttgggttcatagatgccatctgcttgcaactgtatgaggccctgacccacgtgtcagaggactgtttccctttgctagatggctgcagaaagaacaggcagaaatggcaggcccttacagaacagcag

SEQ ID NO: 8912 - DNA, 978 bp, Artificial Sequence
  source: /note="Description of Artificial Sequence: Synthetic Destabilizing Domain (DD)"
gaagaaacaagagagctacagtcgttagcggctgctgtggtgccatctgcccagacccttaaaattactgactttagcttcagtgactttgagctgtctgatctggaaacagcactgtgtacaattcggatgtttactgacctcaaccttgtgcagaacttccagatgaaacatgaggttctttgcagatggattttaagtgttaagaagaattatcggaagaatgttgcctatcataattggagacatgcctttaatacagctcagtgcatgtttgctgctctaaaagcaggcaaaattcagaacaagctgactgacctggagatacttgcattgctgattgctgcactaggccacgatttggatcaccgtggtgtgaataactcttacatacagcgaagtgaacatccacttgcccagctttactgccattcaatcatggaacaccatcattttgaccggtgcctgatgattcttaatagtccaggcaatcagattctcagtggcctctccattgaagaatataagaccacgttgaaaataatcaagcaagctattttagctacagacctagcactgtacattaagaggcgaggagaattttttgaacttataagaaaaaatcaattcaatttggaagatcctcatcaaaaggagttgtttttggcaatgctgatgacagcttgtgatctttctgcaattacaaaaccctggcctattcaacaacggatagcagaacttgtagcaactgaattttttgatcaaggagacagagagagaaaagaactcaacatagaacccactgatctaatgaacagggagaagaaaaacaaaatcccaagtatgcaagttgggttcatagatgccatctgcttgcaactgtatgaggccctgacccacgtgtcagaggactgtttccctttgctagatggctgcagaaagaacaggcagaaatggcaggcccttgcagaacagcag

SEQ ID NO: 8913 - DNA, 978 bp, Artificial Sequence
  source: /note="Description of Artificial Sequence: Synthetic Destabilizing Domain (DD)"
gaagaaacaagagagctacagtcgttagcggctgctgtggtgccatctgcccagacccttaaaattactgactttagcttcagtgactttgggctgtctgatctggaaacagcactgtgtacaattcggatgtttactgacctcaaccttgtgcagaacttccagatgaaacatgaggttctttgcagatggattttaagtgttaagaagaattatcggaagaatgttgcctatcataattggagacatgcctttaatacagctcagtgcatgtttgctgctctaaaagcaggcaaaattcagaacaagctgactgacctggagatacttgcattgctgattgctgcactaagccacgatttggatcaccgtggtgtgaataactcttacatacagcgaagtgaacatccacttgcccagctttactgccattcaatcatggaacaccatcattttgaccagtgcctgatgattcttaatagtccaggcaatcagattctcagtggcctctccattgaagaatataagaccacgttgaaaataatcaagcaagccattttagctacagacctagcactgtacattaagaggcgaggagaattttttgaacttataagaaaaaatcaattcaatttggaagatcctcatcaaaaggagttgtttttggcaatgctgatgacagcttgtgatctttctgcaattacaaaaccctggcctattcaacaacggatagcagaacttgtagcaactgaattttttgatcaaggagacagagagagaaaagaactcaacatagaacccactgatctaatgaacagggagaagaaaaacaaaatcccaagtatgcaagttgggttcatagatgccatctgcttgcaactgtatgaggccctgacccacgtgtcagaggactgtttccctttgctagatggctgcagaaagaacaggcagaaatggcaggcccttgcagaacagcag

SEQ ID NO: 8914 - DNA, 978 bp, Artificial Sequence
  source: /note="Description of Artificial Sequence: Synthetic Destabilizing Domain (DD)"
gaagaaacaagagagctacagtcgttagcggctgctgtggtgccatctgcccagacccttaaaattactgactttagcttcagtgactttgagctgtctgatctggaaacagcactgtgtacaattcggatgtttactgacctcaaccttgtgcagaacttccagatgaaacatgaggttctttgcagatggattttaagtgttaagaagaattatcggaagaatgttgcctatcataattggagacatgcctttaatacagctcagtgcatgtttgctgctctaaaagcaggcaaaattcagaacaagctgactgacctggagatacttgcattgctgattgctgcactaagccacgatttggatcaccgtggtgtgaataactcttacatacagcgaagtgaacatccacttgcccagctttactgccattcaatcatggaacaccatcattttgaccagtgcctgatgattcttaatagtccaggcaatcagattctcagtggcctctccattgaagaatataagaccacgttgaaaataatcaagcaagctattttagctacagacctagcactgtacattaagaggcgaggagaattttttgaacttataagaaaaaatcaattcaatttggaagatcctcatcaaaaggagttgtttttggcaatgctgatgacagcttgtgatctttctgcaattacaaaaccctggcctgttcaacaacggatagcagaacttgtagcaactgaattttttgatcaaggagacagagagagaaaagaactcaacatagaacccactgatctaatgaacagggagaagaaaaacaaaatcccaagtatgcaagttgggttcatagatgccatctgcttgcaactgtatgaggccctgacccacgtgtcagaggactgtttccctttgctagatggctgcagaaagaacaggcagaaatggcaggcccttgcagaacagcag

SEQ ID NO: 8915 - DNA, 978 bp, Artificial Sequence
  source: /note="Description of Artificial Sequence: Synthetic Destabilizing Domain (DD)"
gaagaaacaagagagctacagtcgttagcggctgctgtggtgccatctgcccagacccttaaaattactgactttagcttcagtgactttgagctgtctgatctggaaacagcactgtgtacaattcggatgtttactgacctcaaccttgtgcagaacttccagatgagacatgaggttctttgcagatggattttaagtgttaagaagaattatcggaagaatgttgcctatcataattggagacatgcctttaatacagctcagtgcatgtttgctgctctaaaagcaggcaaaattcagaacaagctgactgacctggagatacttgcattgctgattgctgcactaagccacgatttggatcaccgtggtgtgaataactcttacatacagcgaagtgaacatccacttgcccagctttactgccattcaatcatggaacaccatcattttgaccagtgcctgatgattcttaatagtccaggcaatcagattctcagtggcctctccattgaagaatataagaccacgttgaaaataatcaagcaagctattttagctacagacctagcactgtacattaagaggcgaggagaattttttgaacttataagaaaaaatcaattcaatttggaagatcctcatcaaaaggagttgtttttggcaatgctgatgacagcttgtgatctttctgcaattacaaaaccctggcctattcaacaacggatagcagaacttgtagcaactgaattttttgatcaaggagacagagagagaaaagaactcaacatagaacccactgatctaatgaacagggagaagaaaaacaaaatcccaagtatgcaagttgggttcatagatgccatctgcttgcaactgtatgaggccctgacccacgtgtcagaggactgtttccctttgctagatggctgcagaaagaacaggcagaaatggcaggcccttgcagaacagcag

SEQ ID NO: 8916 - DNA, 978 bp, Artificial Sequence
  source: /note="Description of Artificial Sequence: Synthetic Destabilizing Domain (DD)"
gaagaaacaagagagctacagtcgttagcggctgctgtggtgccatctgcccagacccttaaaattactgactctagcttcagtgactttgagctgtctgatctggaaacagcactgtgtacaattcggatgtttactgacctcaaccttgtgcagaacttccagatgaaacatgaggttctttgcagatggattttaagtgttaagaagaattatcggaagaatgttgcctatcataattggagacatgcctttaatacagctcagtgcatgtttgctgctctaaaagcaggcaaaattcagaacaagctgactgacctggagatacttgcattgctgattgctgcactaagccacgatttggatcaccgtggtgtgaataactcttacatacagcgaagtgaacatccacttgcccagctttactgccattcaatcatggaacaccatcattttgaccagtgcctgatgattcttaatagtccaggcaatcagattctcagtggcctctccattgaagaatgtaagaccacgttgaaaataatcaagcaagctattttagctacagacctagcactgtacattaagaggcgaggagaattttttgaacttataagaaaaaatcaattcaatttggaagatcctcatcaaaaggagttgtttttggcaatgctgacgacagcttgtgatctttctgcaattacaaaaccctggcctattcaacaacggatagcagaacttgtagcaactgaattttttgatcaaggagacagagagagaaaagaactcaacatagaacccactgatctaatgaacagggagaagaaaaacaaaatcccaagtatgcaagttgggttcatagatgccatctgcttgcaactgtatgaggccctgacccacgtgtcagaggactgtttccctttgttagatggctgcagaaagaacaggcagaaatggcaggcccttgcagaacagcag

SEQ ID NO: 8917 - DNA, 978 bp, Artificial Sequence
  source: /note="Description of Artificial Sequence: Synthetic Destabilizing Domain (DD)"
gaagaaacaagagagctacagtcgttagcggctgctgtggtgccatctgcccagacccttaaaattactgactttagcttcagtgactttgagctgtctgatctggaaacagcactgtgtacaattcggatgtttactgacctcaaccttgtgcagaacttccagatgaaacatgaggttctttgcagatggattttaagtgttaagaagaattatcggaagaatgttgcctatcataattggagacatgcctttaatacagctcagtgcatgtttgctgctctaaaagcaggcaaaattcagaacaagctgactgacctggagatacttgcattgctgattgttacactaagccacgatttggatcaccgtggtgtgaataactcttacatacagcgaagtgaacatccacttgcccagctttactgccattcaatcatggaacaccatcattttgaccagtgcctgatgattcttaatagtccaggcaatcagattctcagtggcctctccattgaagaatataagaccacgttgaaaataatcaagcaagctattttagctacagacctagcactgtacattgagaggcgaggagaattttttgaacttataagaaaaaatcaattcaatttggaagatcctcatcaaaaggagttgtttttggcaatgctgatgacagcttgtgatctttctgcaattacaaaaccctggcctattcaacaacggatagcagaacttgtagcaactgaattttttgatcaaggagacagagagagaaaagaactcaatatagaacccactgatctaatgaacagggagaagaaaaacaaaatcccaagtatgcaagttgggttcatagatgccatctgcttgcaactgtataaggccctgacccacgtgtcagaggactgcttccctttgctagatggctgcagaaagaacaggcagaaatggcaggcccttgcagaacagcag

SEQ ID NO: 8918 - DNA, 978 bp, Artificial Sequence
  source: /note="Description of Artificial Sequence: Synthetic Destabilizing Domain (DD)"
gaagaaacaagagagctacagtcgttagcggctgctgtggtgccatctgcccagacccttaaaattactgactttagcttcagtgactttgagctgtctgatctggaaacagcactgtgtacaattcggatgtttactgacctcaaccttgtgcagaacttccagatgaaacatgaggttctttgcagatggattttaagtgttaagaagaattatcggaagaatgttgcctatcataattggagacatgcctttaatacagctcagtgcatgtttgctgctctaaaagcaggcaaaattcagaacaagctgactgacctggagatacttgcattgctgattgctgcactaagccacgatttggatcaccgtggtgtgaataactcttacatacagcgaagtgaacatccacttgcccagctttactgccattcaatcatggaacaccatcattttgaccagtgcctgatgattcttaatagtccaggcaatcagattctcagtggcctctccattgaagaatataagaccacgttgaaaataatcaagcaagctattttagctacagacctagcactgtgcattaagaggcgaggagaattttttgaacttataagaaaaaatcaattcaatttggaagatcctcatcaaaaggagttgtttttggcaatgctgatgacagcttgtgatctttctgcaattacaaaaccctggcctattcaacaacggatagcagaacttgtagcaactgaattttttgatcaaggagacagagagagaaaagaactcaacatagaacccactgatctaatgaacagggagaagaaaaacaaaatcccaagtatgcgagttgggttcatagatgccatctgcttgcaactgtatgaggccctgacccacgtgtcagaggactgtttccctttgctagatggctgcagaaagaacaggcagaaatggcaggcccttgcagaacagcag

SEQ ID NO: 8919 - DNA, 978 bp, Artificial Sequence
  source: /note="Description of Artificial Sequence: Synthetic Destabilizing Domain (DD)"
gaagaaacaagagagctacagtcgttagcggctgctgtggtgccatctgcccagacccttaaaattactgactttagcttcagtgactttgagctgtctgatctggaaacagcactgtgtacaattcggatgtttactgacctcaaccttgtgcagaacttccagatgaaacatgaggttccttgcagatggattttaagtgttaagaagaattatcggaagaatgttgcctatcataattggagacatgcctttaatacagctcagtgcatgtttgctgctctaaaagcaggcaaaattcagaacaagctgactgacctggagatacttgcattgctgattgctgcactaagccacgatttggatcaccgtggtgtgaataactcttacatacagcgaagtgaacatccacttgcccagctttactgccactcaatcatggaacaccatcattttgaccagtgcctgatgattcttaatagtccaggcaatcagattctcagtggcctctccattgaagaatataagaccacgttgaaaataatcaagcaagctattttagctacagacctagcactgtacattaagaggcgaggagaattttttgaacttataagaagaaatcaattcaatttggaagatcctcatcaaaaggagttgtttttggcaatgctgatgacagcttgtgatctttctgcaattacaaaaccctggcctattcaacaacggatagcagaacttgtagcaactgaattttttgatcaaggagacagagagagaaaagaactcaacatagaacccactgatctaatgaacagggagaagaaaaacaaaatcccaagtatgcaagttgggttcatagatgccatctgcttgcaactgtatgaggccctgacccacgtgtcagaggactgtttccctttgctagatggctgcagaaagaacaggcagaaatggcaggcccttgcagaacagcag

SEQ ID NO: 8920 - DNA, 978 bp, Artificial Sequence
  source: /note="Description of Artificial Sequence: Synthetic Destabilizing Domain (DD)"
gaagaaacaagagagctacagtcgttagcggctgctgtggtgccatctgcccagacccttaaaattactgactttagcttcagtgactttgagctgtctgatctggaaacagcactgtgtacaatttggatgtttactgacctcaaccttgtgcagaacttccagatgaaacatgaggttctttgcagatggattttaagtgttaagaagaattatcggaagaatgttgcctatcataatcggagacatgcctttaatacagctcagtgcatgtttgctgctctaaaagcaggcaaaattcagaacaagctgactgacctggagatacttgcattgctgattgctgcactaagccacgatttggatcaccgtggtgtgaataactcttacatacagcgaagtgaacatccacttgcccagctttactgccattcaatcatggaacaccatcattttgaccagtgcctgatgattcttaatagtccaggcaatcagattctcagtggcctctccattgaagaatataagaccacgttgaaaataatcaagcaagctattttagctacagacctagcactgtacattaagaggcgaggagaattttttgaacttataagaaaaaatcaattcaatttggaagatcctcatcaaaaggagttgtttttggcaatgctgatgacagcttgtgatctttctgcaattacaaaaccctggcctattcaacaacggatagcagaacttgtagcaactgaattttttgatcaaggagacagagagagaaaagaactcaacatagaacccactgatctaacgaacagggagaagaaaaacaaaatcccaagtatgcaagttgggttcgtagatgccatctgcttgcaactgtatgaggccctgacccacgtgtcagaggactgtttccctttgctagatggctgcagaaagaacaggcagaaatggcaggcccttgcagaacagcag

SEQ ID NO: 8921 - protein, 239 aa, Artificial Sequence
  source: /note="Description of Artificial Sequence: Synthetic Payload sequence"
MVSKGEELFTGVVPILVELDGDVNGHKFSVSGEGEGDATYGKLTLKFICTTGKLPVPWPTLVTTLTYGVQCFSRYPDHMKQHDFFKSAMPEGYVQERTIFFKDDGNYKTRAEVKFEGDTLVNRIELKGIDFKEDGNILGHKLEYNYNSHNVYIMADKQKNGIKVNFKIRHNIEDGSVQLADHYQQNTPIGDGPVLLPDNHYLSTQSKLSKDPNEKRDHMVLLEFVTAAGITLGMDELYK

SEQ ID NO: 8922 - protein, 238 aa, Artificial Sequence
  source: /note="Description of Artificial Sequence: Synthetic Payload sequence"
VSKGEELFTGVVPILVELDGDVNGHKFSVSGEGEGDATYGKLTLKFICTTGKLPVPWPTLVTTLTYGVQCFSRYPDHMKQHDFFKSAMPEGYVQERTIFFKDDGNYKTRAEVKFEGDTLVNRIELKGIDFKEDGNILGHKLEYNYNSHNVYIMADKQKNGIKVNFKIRHNIEDGSVQLADHYQQNTPIGDGPVLLPDNHYLSTQSALSKDPNEKRDHMVLLEFVTAAGITLGMDELYK

SEQ ID NO: 8923 - DNA, 717 bp, Artificial Sequence
  source: /note="Description of Artificial Sequence: Synthetic Payload sequence"
atggtgagcaagggcgaggagctgttcaccggggtggtgcccatcctggtcgagctggacggcgacgtaaacggccacaagttcagcgtgtccggcgagggcgagggcgatgccacctacggcaagctgaccctgaagttcatctgcaccaccggcaagctgcccgtgccctggcccaccctcgtgaccaccctgacctacggcgtgcagtgcttcagccgctaccccgaccacatgaagcagcacgacttcttcaagtccgccatgcccgaaggctacgtccaggagcgcaccatcttcttcaaggacgacggcaactacaagacccgcgccgaggtgaagttcgagggcgacaccctggtgaaccgcatcgagctgaagggcatcgacttcaaggaggacggcaacatcctggggcacaagctggagtacaactacaacagccacaacgtctatatcatggccgacaagcagaagaacggcatcaaggtgaacttcaagatccgccacaacatcgaggacggcagcgtgcagctcgccgaccactaccagcagaacacccccatcggcgacggccccgtgctgctgcccgacaaccactacctgagcacccagtccaagctgagcaaagaccccaacgagaagcgcgatcacatggtcctgctggagttcgtgaccgccgccgggatcactctcggcatggacgagctgtacaag

SEQ ID NO: 8924 - DNA, 714 bp, Artificial Sequence
  source: /note="Description of Artificial Sequence: Synthetic Payload sequence"
gtgagcaagggcgaggagctgttcaccggggtggtgcccatcctggtcgagctggacggcgacgtaaacggccacaagttcagcgtgtccggcgagggcgagggcgatgccacctacggcaagctgaccctgaagttcatctgcaccaccggcaagctgcccgtgccctggcccaccctcgtgaccaccctgacctacggcgtgcagtgcttcagccgctaccccgaccacatgaagcagcacgacttcttcaagtccgccatgcccgaaggctacgtccaggagcgcaccatcttcttcaaggacgacggcaactacaagacccgcgccgaggtgaagttcgagggcgacaccctggtgaaccgcatcgagctgaagggcatcgacttcaaggaggacggcaacatcctggggcacaagctggagtacaactacaacagccacaacgtctatatcatggccgacaagcagaagaacggcatcaaggtgaacttcaagatccgccacaacatcgaggacggcagcgtgcagctcgccgaccactaccagcagaacacccccatcggcgacggccccgtgctgctgcccgacaaccactacctgagcacccagtccgccctgagcaaagaccccaacgagaagcgcgatcacatggtcctgctggagttcgtgaccgccgccgggatcactctcggcatggacgagctgtacaag

SEQ ID NO: 8925 - protein, 488 aa, Artificial Sequence
  source: /note="Description of Artificial Sequence: Synthetic polypeptide"
MALPVTALLLPLALLLHAARPDIQMTQTTSSLSASLGDRVTISCRASQDISKYLNWYQQKPDGTVKLLIYHTSRLHSGVPSRFSGSGSGTDYSLTISNLEQEDIATYFCQQGNTLPYTFGGGTKLEITGGGGSGGGGSGGGGSEVKLQESGPGLVAPSQSLSVTCTVSGVSLPDYGVSWIRQPPRKGLEWLGVIWGSETTYYNSALKSRLTIIKDNSKSQVFLKMNSLQTDDTAIYYCAKHYYYGGSYAMDYWGQGTSVTVSSTTTPAPRPPTPAPTIASQPLSLRPEACRPAAGGAVHTRGLDFACDIYIWAPLAGTCGVLLLSLVITLYCKRGRKKLLYIFKQPFMRPVQTTQEEDGCSCRFPEEEEGGCELRVKFSRSADAPAYKQGQNQLYNELNLGRREEYDVLDKRRGRDPEMGGKPRRKNPQEGLYNELQKDKMAEAYSEIGMKGERRRGKGHDGLYQGLSTATKDTYDALHMQALPPRGS

SEQ ID NO: 8926 - protein, 814 aa, Artificial Sequence; identical to SEQ ID NO: 8283
  source: /note="Description of Artificial Sequence: Synthetic polypeptide"

SEQ ID NO: 8927 - protein, 823 aa, Artificial Sequence
  source: /note="Description of Artificial Sequence: Synthetic polypeptide"
MALPVTALLLPLALLLHAARPYPYDVPDYADIQMTQTTSSLSASLGDRVTISCRASQDISKYLNWYQQKPDGTVKLLIYHTSRLHSGVPSRFSGSGSGTDYSLTISNLEQEDIATYFCQQGNTLPYTFGGGTKLEITGGGGSGGGGSGGGGSEVKLQESGPGLVAPSQSLSVTCTVSGVSLPDYGVSWIRQPPRKGLEWLGVIWGSETTYYNSALKSRLTIIKDNSKSQVFLKMNSLQTDDTAIYYCAKHYYYGGSYAMDYWGQGTSVTVSSTTTPAPRPPTPAPTIASQPLSLRPEACRPAAGGAVHTRGLDFACDIYIWAPLAGTCGVLLLSLVITLYCKRGRKKLLYIFKQPFMRPVQTTQEEDGCSCRFPEEEEGGCELRVKFSRSADAPAYKQGQNQLYNELNLGRREEYDVLDKRRGRDPEMGGKPRRKNPQEGLYNELQKDKMAEAYSEIGMKGERRRGKGHDGLYQGLSTATKDTYDALHMQALPPRGSEETRELQSLAAAVVPSAQTLKITDFSFSDFELSDLETALCTIRMFTDLNLVQNFQMKHEVLCRWILSVKKNYRKNVAYHNWRHAFNTAQCMFAALKAGKIQNKLTDLEILALLIAALSHDLDHRGVNNSYIQRSEHPLAQLYCHSIMEHHHFDQCLMILNSPGNQILSGLSIEEYKTTLKIIKQAILATDLALYIKRLGEFAELIRKNQFNLEDPHQKELFLAMLMTACDLSAITKPWPIQQRIAELVATEFFDQGDRERKELNIEPTDLMNREKKNKIPSMQVGFIDAICLQLYEALTHVSEDCFPLLDGCRKNRQKWQALAEQQ

SEQ ID NO: 8928 - protein, 823 aa, Artificial Sequence
  source: /note="Description of Artificial Sequence: Synthetic polypeptide"
MALPVTALLLPLALLLHAARPYPYDVPDYADIQMTQTTSSLSASLGDRVTISCRASQDISKYLNWYQQKPDGTVKLLIYHTSRLHSGVPSRFSGSGSGTDYSLTISNLEQEDIATYFCQQGNTLPYTFGGGTKLEITGGGGSGGGGSGGGGSEVKLQESGPGLVAPSQSLSVTCTVSGVSLPDYGVSWIRQPPRKGLEWLGVIWGSETTYYNSALKSRLTIIKDNSKSQVFLKMNSLQTDDTAIYYCAKHYYYGGSYAMDYWGQGTSVTVSSTTTPAPRPPTPAPTIASQPLSLRPEACRPAAGGAVHTRGLDFACDIYIWAPLAGTCGVLLLSLVITLYCKRGRKKLLYIFKQPFMRPVQTTQEEDGCSCRFPEEEEGGCELRVKFSRSADAPAYKQGQNQLYNELNLGRREEYDVLDKRRGRDPEMGGKPRRKNPQEGLYNELQKDKMAEAYSEIGMKGERRRGKGHDGLYQGLSTATKDTYDALHMQALPPRGSEETRELQSLAAAVVPSAQTLKITDFSFSDFELSDLETALCTIRMFTDLNLVQNFQMKHEVLCRWILSVKKNYRKNVAYHNWRHAFNTAQCMFAALKAGKIQNKLTDLEILALLIAALSADLDHRGVNNSYIQRSEHPLAQLYCHSIMEHHHFDQCLMILNSPGNQILSGLSIEEYKTTLKIIKQAILATDLALYIKRLGEFFELIRKNQFNLEDPHQKELFLAMLMTACDLSAITKPWPIQQRIAELVATEFFDQGDRERKELNIEPTDLMNREKKNKIPSMQVGFIDAICLQLYEALTHVSEDCFPLLDGCRKNRQKWQALAEQQ

SEQ ID NO: 8929 - protein, 497 aa, Artificial Sequence
  source: /note="Description of Artificial Sequence: Synthetic polypeptide"
MALPVTALLLPLALLLHAARPYPYDVPDYADIQMTQTTSSLSASLGDRVTISCRASQDISKYLNWYQQKPDGTVKLLIYHTSRLHSGVPSRFSGSGSGTDYSLTISNLEQEDIATYFCQQGNTLPYTFGGGTKLEITGGGGSGGGGSGGGGSEVKLQESGPGLVAPSQSLSVTCTVSGVSLPDYGVSWIRQPPRKGLEWLGVIWGSETTYYNSALKSRLTIIKDNSKSQVFLKMNSLQTDDTAIYYCAKHYYYGGSYAMDYWGQGTSVTVSSTTTPAPRPPTPAPTIASQPLSLRPEACRPAAGGAVHTRGLDFACDIYIWAPLAGTCGVLLLSLVITLYCKRGRKKLLYIFKQPFMRPVQTTQEEDGCSCRFPEEEEGGCELRVKFSRSADAPAYKQGQNQLYNELNLGRREEYDVLDKRRGRDPEMGGKPRRKNPQEGLYNELQKDKMAEAYSEIGMKGERRRGKGHDGLYQGLSTATKDTYDALHMQALPPRGS

SEQ ID NO: 8930 - protein, 729 aa, Artificial Sequence
  source: /note="Description of Artificial Sequence: Synthetic polypeptide"
MALPVTALLLPLALLLHAARPDIQMTQTTSSLSASLGDRVTISCRASQDISKYLNWYQQKPDGTVKLLIYHTSRLHSGVPSRFSGSGSGTDYSLTISNLEQEDIATYFCQQGNTLPYTFGGGTKLEITGGGGSGGGGSGGGGSEVKLQESGPGLVAPSQSLSVTCTVSGVSLPDYGVSWIRQPPRKGLEWLGVIWGSETTYYNSALKSRLTIIKDNSKSQVFLKMNSLQTDDTAIYYCAKHYYYGGSYAMDYWGQGTSVTVSSTTTPAPRPPTPAPTIASQPLSLRPEACRPAAGGAVHTRGLDFACDIYIWAPLAGTCGVLLLSLVITLYCKRGRKKLLYIFKQPFMRPVQTTQEEDGCSCRFPEEEEGGCELRVKFSRSADAPAYKQGQNQLYNELNLGRREEYDVLDKRRGRDPEMGGKPRRKNPQEGLYNELQKDKMAEAYSEIGMKGERRRGKGHDGLYQGLSTATKDTYDALHMQALPPRGSMVSKGEELFTGVVPILVELDGDVNGHKFSVSGEGEGDATYGKLTLKFICTTGKLPVPWPTLVTTLTYGVQCFSRYPDHMKQHDFFKSAMPEGYVQERTIFFKDDGNYKTRAEVKFEGDTLVNRIELKGIDFKEDGNILGHKLEYNYNSHNVYIMADKQKNGIKVNFKIRHNIEDGSVQLADHYQQNTPIGDGPVLLPDNHYLSTQSKLSKDPNEKRDHMVLLEFVTAAGITLGMDELYKGS

SEQ ID NO: 8931 - protein, 1055 aa, Artificial Sequence
  source: /note="Description of Artificial Sequence: Synthetic polypeptide"
MALPVTALLLPLALLLHAARPDIQMTQTTSSLSASLGDRVTISCRASQDISKYLNWYQQKPDGTVKLLIYHTSRLHSGVPSRFSGSGSGTDYSLTISNLEQEDIATYFCQQGNTLPYTFGGGTKLEITGGGGSGGGGSGGGGSEVKLQESGPGLVAPSQSLSVTCTVSGVSLPDYGVSWIRQPPRKGLEWLGVIWGSETTYYNSALKSRLTIIKDNSKSQVFLKMNSLQTDDTAIYYCAKHYYYGGSYAMDYWGQGTSVTVSSTTTPAPRPPTPAPTIASQPLSLRPEACRPAAGGAVHTRGLDFACDIYIWAPLAGTCGVLLLSLVITLYCKRGRKKLLYIFKQPFMRPVQTTQEEDGCSCRFPEEEEGGCELRVKFSRSADAPAYKQGQNQLYNELNLGRREEYDVLDKRRGRDPEMGGKPRRKNPQEGLYNELQKDKMAEAYSEIGMKGERRRGKGHDGLYQGLSTATKDTYDALHMQALPPRGSMVSKGEELFTGVVPILVELDGDVNGHKFSVSGEGEGDATYGKLTLKFICTTGKLPVPWPTLVTTLTYGVQCFSRYPDHMKQHDFFKSAMPEGYVQERTIFFKDDGNYKTRAEVKFEGDTLVNRIELKGIDFKEDGNILGHKLEYNYNSHNVYIMADKQKNGIKVNFKIRHNIEDGSVQLADHYQQNTPIGDGPVLLPDNHYLSTQSKLSKDPNEKRDHMVLLEFVTAAGITLGMDELYKGSEETRELQSLAAAVVPSAQTLKITDFSFSDFELSDLETALCTIRMFTDLNLVQNFQMKHEVLCRWILSVKKNYRKNVAYHNWRHAFNTAQCMFAALKAGKIQNKLTDLEILALLIAALSADLDHRGVNNSYIQRSEHPLAQLYCHSIMEHHHFDQCLMILNSPGNQILSGLSIEEYKTTLKIIKQAILATDLALYIKRLGEFFELIRKNQFNLEDPHQKELFLAMLMTACDLSAITKPWPIQQRIAELVATEFFDQGDRERKELNIEPTDLMNREKKNKIPSMQVGFIDAICLQLYEALTHVSEDCFPLLDGCRKNRQKWQALAEQQ

SEQ ID NO: 8932 - protein, 1386 aa, Artificial Sequence
  source: /note="Description of Artificial Sequence: Synthetic polypeptide"
MALPVTALLLPLALLLHAARPDIQMTQTTSSLSASLGDRVTISCRASQDISKYLNWYQQKPDGTVKLLIYHTSRLHSGVPSRFSGSGSGTDYSLTISNLEQEDIATYFCQQGNTLPYTFGGGTKLEITGGGGSGGGGSGGGGSEVKLQESGPGLVAPSQSLSVTCTVSGVSLPDYGVSWIRQPPRKGLEWLGVIWGSETTYYNSALKSRLTIIKDNSKSQVFLKMNSLQTDDTAIYYCAKHYYYGGSYAMDYWGQGTSVTVSSTTTPAPRPPTPAPTIASQPLSLRPEACRPAAGGAVHTRGLDFACDIYIWAPLAGTCGVLLLSLVITLYCKRGRKKLLYIFKQPFMRPVQTTQEEDGCSCRFPEEEEGGCELRVKFSRSADAPAYKQGQNQLYNELNLGRREEYDVLDKRRGRDPEMGGKPRRKNPQEGLYNELQKDKMAEAYSEIGMKGERRRGKGHDGLYQGLSTATKDTYDALHMQALPPRGSEETRELQSLAAAVVPSAQTLKITDFSFSDFELSDLETALCTIRMFTDLNLVQNFQMKHEVLCRWILSVKKNYRKNVAYHNWRHAFNTAQCMFAALKAGKIQNKLTDLEILALLIAALSADLDHRGVNNSYIQRSEHPLAQLYCHSIMEHHHFDQCLMILNSPGNQILSGLSIEEYKTTLKIIKQAILATDLALYIKRLGEFFELIRKNQFNLEDPHQKELFLAMLMTACDLSAITKPWPIQQRIAELVATEFFDQGDRERKELNIEPTDLMNREKKNKIPSMQVGFIDAICLQLYEALTHVSEDCFPLLDGCRKNRQKWQALAEQQGSGATNFSLLKQAGDVEENPGPMEDAKNIKKGPAPFYPLEDGTAGEQLHKAMKRYALVPGTIAFTDAHIEVDITYAEYFEMSVRLAEAMKRYGLNTNHRIVVCSENSLQFFMPVLGALFIGVAVAPANDIYNERELLNSMGISQPTVVFVSKKGLQKILNVQKKLPIIQKIIIMDSKTDYQGFQSMYTFVTSHLPPGFNEYDFVPESFDRDKTIALIMNSSGSTGLPKGVALPHRTACVRFSHARDPIFGNQIIPDTAILSVVPFHHGFGMFTTLGYLICGFRVVLMYRFEEELFLRSLQDYKIQSALLVPTLFSFFAKSTLIDKYDLSNLHEIASGGAPLSKEVGEAVAKRFHLPGIRQGYGLTETTSAILITPEGDDKPGAVGKVVPFFEAKVVDLDTGKTLGVNQRGELCVRGPMIMSGYVNNPEATNALIDKDGWLHSGDIAYWDEDEHFFIVDRLKSLIKYKGYQVAPAELESILLQHPNIFDAGVAGLPDDDAGELPAAVVVLEHGKTMTEKEIVDYVASQVTTAKKLRGGVVFVDEVPKGLTGKLDARKIREILIKAKKGGKIAV

SEQ ID NO: 8933 - protein, 1386 aa, Artificial Sequence
  source: /note="Description of Artificial Sequence: Synthetic polypeptide"
MALPVTALLLPLALLLHAARPDIQMTQTTSSLSASLGDRVTISCRASQDISKYLNWYQQKPDGTVKLLIYHTSRLHSGVPSRFSGSGSGTDYSLTISNLEQEDIATYFCQQGNTLPYTFGGGTKLEITGGGGSGGGGSGGGGSEVKLQESGPGLVAPSQSLSVTCTVSGVSLPDYGVSWIRQPPRKGLEWLGVIWGSETTYYNSALKSRLTIIKDNSKSQVFLKMNSLQTDDTAIYYCAKHYYYGGSYAMDYWGQGTSVTVSSTTTPAPRPPTPAPTIASQPLSLRPEACRPAAGGAVHTRGLDFACDIYIWAPLAGTCGVLLLSLVITLYCKRGRKKLLYIFKQPFMRPVQTTQEEDGCSCRFPEEEEGGCELRVKFSRSADAPAYKQGQNQLYNELNLGRREEYDVLDKRRGRDPEMGGKPRRKNPQEGLYNELQKDKMAEAYSEIGMKGERRRGKGHDGLYQGLSTATKDTYDALHMQALPPRGSEETRELQSLAAAVVPSAQTLKITDFSFSDFELSDLETALCTIRMFTDLNLVQNFQMKHEVLCRWILSVKKNYRKNVAYHNWRHAFNTAQCMFAALKAGKIQNKLTDLEILALLIAALSHDLDHRGVNNSYIQRSEHPLAQLYCHSIMEHHHFDQCLMILNSPGNQILSGLSIEEYKTTLKIIKQAILATDLALYIKRRGEFFELIRKNQFNLEDPHQKELFLAMLMTACDLSAITKPWPIQQRIAELVATEFFDQGDRERKELNIEPTDLMNREKKNKIPSMQVGFIDAICLQLYEALTHVSEDCFPLLDGCRKNRQKWQALAEQQGSGATNFSLLKQAGDVEENPGPMEDAKNIKKGPAPFYPLEDGTAGEQLHKAMKRYALVPGTIAFTDAHIEVDITYAEYFEMSVRLAEAMKRYGLNTNHRIVVCSENSLQFFMPVLGALFIGVAVAPANDIYNERELLNSMGISQPTVVFVSKKGLQKILNVQKKLPIIQKIIIMDSKTDYQGFQSMYTFVTSHLPPGFNEYDFVPESFDRDKTIALIMNSSGSTGLPKGVALPHRTACVRFSHARDPIFGNQIIPDTAILSVVPFHHGFGMFTTLGYLICGFRVVLMYRFEEELFLRSLQDYKIQSALLVPTLFSFFAKSTLIDKYDLSNLHEIASGGAPLSKEVGEAVAKRFHLPGIRQGYGLTETTSAILITPEGDDKPGAVGKVVPFFEAKVVDLDTGKTLGVNQRGELCVRGPMIMSGYVNNPEATNALIDKDGWLHSGDIAYWDEDEHFFIVDRLKSLIKYKGYQVAPAELESILLQHPNIFDAGVAGLPDDDAGELPAAVVVLEHGKTMTEKEIVDYVASQVTTAKKLRGGVVFVDEVPKGLTGKLDARKIREILIKAKKGGKIAV

SEQ ID NO: 8934 - protein, 1074 aa, Artificial Sequence
  source: /note="Description of Artificial Sequence: Synthetic polypeptide"
MALPVTALLLPLALLLHAARPDIQMTQTTSSLSASLGDRVTISCRASQDISKYLNWYQQKPDGTVKLLIYHTSRLHSGVPSRFSGSGSGTDYSLTISNLEQEDIATYFCQQGNTLPYTFGGGTKLEITGGGGSGGGGSGGGGSEVKLQESGPGLVAPSQSLSVTCTVSGVSLPDYGVSWIRQPPRKGLEWLGVIWGSETTYYNSALKSRLTIIKDNSKSQVFLKMNSLQTDDTAIYYCAKHYYYGGSYAMDYWGQGTSVTVSSTTTPAPRPPTPAPTIASQPLSLRPEACRPAAGGAVHTRGLDFACDIYIWAPLAGTCGVLLLSLVITLYCKRGRKKLLYIFKQPFMRPVQTTQEEDGCSCRFPEEEEGGCELRVKFSRSADAPAYKQGQNQLYNELNLGRREEYDVLDKRRGRDPEMGGKPRRKNPQEGLYNELQKDKMAEAYSEIGMKGERRRGKGHDGLYQGLSTATKDTYDALHMQALPPRGSEETRELQSLAAAVVPSAQTLKITDFSFSDFELSDLETALCTIRMFTDLNLVQNFQMKHEVLCRWILSVKKNYRKNVAYHNWRHAFNTAQCMFAALKAGKIQNKLTDLEILALLIAALSADLDHRGVNNSYIQRSEHPLAQLYCHSIMEHHHFDQCLMILNSPGNQILSGLSIEEYKTTLKIIKQAILATDLALYIKRLGEFFELIRKNQFNLEDPHQKELFLAMLMTACDLSAITKPWPIQQRIAELVATEFFDQGDRERKELNIEPTDLMNREKKNKIPSMQVGFIDAICLQLYEALTHVSEDCFPLLDGCRKNRQKWQALAEQQGSGATNFSLLKQAGDVEENPGPVSKGEELFTGVVPILVELDGDVNGHKFSVSGEGEGDATYGKLTLKFICTTGKLPVPWPTLVTTLTYGVQCFSRYPDHMKQHDFFKSAMPEGYVQERTIFFKDDGNYKTRAEVKFEGDTLVNRIELKGIDFKEDGNILGHKLEYNYNSHNVYIMADKQKNGIKVNFKIRHNIEDGSVQLADHYQQNTPIGDGPVLLPDNHYLSTQSALSKDPNEKRDHMVLLEFVTAAGITLGMDELYK

SEQ ID NO: 8935 - protein, 1074 aa, Artificial Sequence
  source: /note="Description of Artificial Sequence: Synthetic polypeptide"
MALPVTALLLPLALLLHAARPDIQMTQTTSSLSASLGDRVTISCRASQDISKYLNWYQQKPDGTVKLLIYHTSRLHSGVPSRFSGSGSGTDYSLTISNLEQEDIATYFCQQGNTLPYTFGGGTKLEITGGGGSGGGGSGGGGSEVKLQESGPGLVAPSQSLSVTCTVSGVSLPDYGVSWIRQPPRKGLEWLGVIWGSETTYYNSALKSRLTIIKDNSKSQVFLKMNSLQTDDTAIYYCAKHYYYGGSYAMDYWGQGTSVTVSSTTTPAPRPPTPAPTIASQPLSLRPEACRPAAGGAVHTRGLDFACDIYIWAPLAGTCGVLLLSLVITLYCKRGRKKLLYIFKQPFMRPVQTTQEEDGCSCRFPEEEEGGCELRVKFSRSADAPAYKQGQNQLYNELNLGRREEYDVLDKRRGRDPEMGGKPRRKNPQEGLYNELQKDKMAEAYSEIGMKGERRRGKGHDGLYQGLSTATKDTYDALHMQALPPRGSEETRELQSLAAAVVPSAQTLKITDFSFSDFELSDLETALCTIRMFTDLNLVQNFQMKHEVLCRWILSVKKNYRKNVAYHNWRHAFNTAQCMFAALKAGKIQNKLTDLEILALLIAALSHDLDHRGVNNSYIQRSEHPLAQLYCHSIMEHHHFDQCLMILNSPGNQILSGLSIEEYKTTLKIIKQAILATDLALYIKRRGEFFELIRKNQFNLEDPHQKELFLAMLMTACDLSAITKPWPIQQRIAELVATEFFDQGDRERKELNIEPTDLMNREKKNKIPSMQVGFIDAICLQLYEALTHVSEDCFPLLDGCRKNRQKWQALAEQQGSGATNFSLLKQAGDVEENPGPVSKGEELFTGVVPILVELDGDVNGHKFSVSGEGEGDATYGKLTLKFICTTGKLPVPWPTLVTTLTYGVQCFSRYPDHMKQHDFFKSAMPEGYVQERTIFFKDDGNYKTRAEVKFEGDTLVNRIELKGIDFKEDGNILGHKLEYNYNSHNVYIMADKQKNGIKVNFKIRHNIEDGSVQLADHYQQNTPIGDGPVLLPDNHYLSTQSALSKDPNEKRDHMVLLEFVTAAGITLGMDELYK

SEQ ID NO: 8936 - protein, 816 aa, Artificial Sequence
  source: /note="Description of Artificial Sequence: Synthetic polypeptide"
MALPVTALLLPLALLLHAARPGSEETRELQSLAAAVVPSAQTLKITDFSFSDFELSDLETALCTIRMFTDLNLVQNFQMKHEVLCRWILSVKKNYRKNVAYHNWRHAFNTAQCMFAALKAGKIQNKLTDLEILALLIAALSADLDHRGVNNSYIQRSEHPLAQLYCHSIMEHHHFDQCLMILNSPGNQILSGLSIEEYKTTLKIIKQAILATDLALYIKRLGEFFELIRKNQFNLEDPHQKELFLAMLMTACDLSAITKPWPIQQRIAELVATEFFDQGDRERKELNIEPTDLMNREKKNKIPSMQVGFIDAICLQLYEALTHVSEDCFPLLDGCRKNRQKWQALAEQQGSDIQMTQTTSSLSASLGDRVTISCRASQDISKYLNWYQQKPDGTVKLLIYHTSRLHSGVPSRFSGSGSGTDYSLTISNLEQEDIATYFCQQGNTLPYTFGGGTKLEITGGGGSGGGGSGGGGSEVKLQESGPGLVAPSQSLSVTCTVSGVSLPDYGVSWIRQPPRKGLEWLGVIWGSETTYYNSALKSRLTIIKDNSKSQVFLKMNSLQTDDTAIYYCAKHYYYGGSYAMDYWGQGTSVTVSSTTTPAPRPPTPAPTIASQPLSLRPEACRPAAGGAVHTRGLDFACDIYIWAPLAGTCGVLLLSLVITLYCKRGRKKLLYIFKQPFMRPVQTTQEEDGCSCRFPEEEEGGCELRVKFSRSADAPAYKQGQNQLYNELNLGRREEYDVLDKRRGRDPEMGGKPRRKNPQEGLYNELQKDKMAEAYSEIGMKGERRRGKGHDGLYQGLSTATKDTYDALHMQALPPR

SEQ ID NO: 8937 - protein, 828 aa, Artificial Sequence
  source: /note="Description of Artificial Sequence: Synthetic polypeptide"
MALPVTALLLPLALLLHAARPGSEETRELQSLAAAVVPSAQTLKITDFSFSDFELSDLETALCTIRMFTDLNLVQNFQMKHEVLCRWILSVKKNYRKNVAYHNWRHAFNTAQCMFAALKAGKIQNKLTDLEILALLIAALSADLDHRGVNNSYIQRSEHPLAQLYCHSIMEHHHFDQCLMILNSPGNQILSGLSIEEYKTTLKIIKQAILATDLALYIKRLGEFFELIRKNQFNLEDPHQKELFLAMLMTACDLSAITKPWPIQQRIAELVATEFFDQGDRERKELNIEPTDLMNREKKNKIPSMQVGFIDAICLQLYEALTHVSEDCFPLLDGCRKNRQKWQALAEQQGSESRRVRRNKRSKDIQMTQTTSSLSASLGDRVTISCRASQDISKYLNWYQQKPDGTVKLLIYHTSRLHSGVPSRFSGSGSGTDYSLTISNLEQEDIATYFCQQGNTLPYTFGGGTKLEITGGGGSGGGGSGGGGSEVKLQESGPGLVAPSQSLSVTCTVSGVSLPDYGVSWIRQPPRKGLEWLGVIWGSETTYYNSALKSRLTIIKDNSKSQVFLKMNSLQTDDTAIYYCAKHYYYGGSYAMDYWGQGTSVTVSSTTTPAPRPPTPAPTIASQPLSLRPEACRPAAGGAVHTRGLDFACDIYIWAPLAGTCGVLLLSLVITLYCKRGRKKLLYIFKQPFMRPVQTTQEEDGCSCRFPEEEEGGCELRVKFSRSADAPAYKQGQNQLYNELNLGRREEYDVLDKRRGRDPEMGGKPRRKNPQEGLYNELQKDKMAEAYSEIGMKGERRRGKGHDGLYQGLSTATKDTYDALHMQALPPR

SEQ ID NO: 8938 - protein, 814 aa, Artificial Sequence
  source: /note="Description of Artificial Sequence: Synthetic polypeptide"
MALPVTALLLPLALLLHAARPDIQMTQTTSSLSASLGDRVTISCRASQDISKYLNWYQQKPDGTVKLLIYHTSRLHSGVPSRFSGSGSGTDYSLTISNLEQEDIATYFCQQGNTLPYTFGGGTKLEITGGGGSGGGGSGGGGSEVKLQESGPGLVAPSQSLSVTCTVSGVSLPDYGVSWIRQPPRKGLEWLGVIWGSETTYYNSALKSRLTIIKDNSKSQVFLKMNSLQTDDTAIYYCAKHYYYGGSYAMDYWGQGTSVTVSSASFEIEVMYPPPYLDNEKSNGTIIHVKGKHLCPSPLFPGPSKPFWVLVVVGGVLACYSLLVTVAFIIFWVRSKRSRLLHSDYMNMTPRRPGPTRKHYQPYAPPRDFAAYRSRVKFSRSADAPAYKQGQNQLYNELNLGRREEYDVLDKRRGRDPEMGGKPRRKNPQEGLYNELQKDKMAEAYSEIGMKGERRRGKGHDGLYQGLSTATKDTYDALHMQALPPRGSEETRELQSLAAAVVPSAQTLKITDFSFSDFELSDLETALCTIRMFTDLNLVQNFQMKHEVLCRWILSVKKNYRKNVAYHNWRHAFNTAQCMFAALKAGKIQNKLTDLEILALLIAALSADLDHRGVNNSYIQRSEHPLAQLYCHSIMEHHHFDQCLMILNSPGNQILSGLSIEEYKTTLKIIKQAILATDLALYIKRLGEFFELIRKNQFNLEDPHQKELFLAMLMTACDLSAITKPWPIQQRIAELVATEFFDQGDRERKELNIEPTDLMNREKKNKIPSMQVGFIDAICLQLYEALTHVSEDCFPLLDGCRKNRQKWQALAEQQ

SEQ ID NO: 8939 - protein, 816 aa, Artificial Sequence
  source: /note="Description of Artificial Sequence: Synthetic polypeptide"
MALPVTALLLPLALLLHAARPDIQMTQTTSSLSASLGDRVTISCRASQDISKYLNWYQQKPDGTVKLLIYHTSRLHSGVPSRFSGSGSGTDYSLTISNLEQEDIATYFCQQGNTLPYTFGGGTKLEITGGGGSGGGGSGGGGSEVKLQESGPGLVAPSQSLSVTCTVSGVSLPDYGVSWIRQPPRKGLEWLGVIWGSETTYYNSALKSRLTIIKDNSKSQVFLKMNSLQTDDTAIYYCAKHYYYGGSYAMDYWGQGTSVTVSSTTTPAPRPPTPAPTIASQPLSLRPEACRPAAGGAVHTRGLDFACDIYIWAPLAGTCGVLLLSLVITLYCKRGRKKLLYIFKQPFMRPVQTTQEEDGCSCRFPEEEEGGCELGSEETRELQSLAAAVVPSAQTLKITDFSFSDFELSDLETALCTIRMFTDLNLVQNFQMKHEVLCRWILSVKKNYRKNVAYHNWRHAFNTAQCMFAALKAGKIQNKLTDLEILALLIAALSADLDHRGVNNSYIQRSEHPLAQLYCHSIMEHHHFDQCLMILNSPGNQILSGLSIEEYKTTLKIIKQAILATDLALYIKRLGEFFELIRKNQFNLEDPHQKELFLAMLMTACDLSAITKPWPIQQRIAELVATEFFDQGDRERKELNIEPTDLMNREKKNKIPSMQVGFIDAICLQLYEALTHVSEDCFPLLDGCRKNRQKWQALAEQQGSRVKFSRSADAPAYKQGQNQLYNELNLGRREEYDVLDKRRGRDPEMGGKPRRKNPQEGLYNELQKDKMAEAYSEIGMKGERRRGKGHDGLYQGLSTATKDTYDALHMQALPPR

SEQ ID NO: 8940 - protein, 816 aa, Artificial Sequence
  source: /note="Description of Artificial Sequence: Synthetic polypeptide"
MALPVTALLLPLALLLHAARPDIQMTQTTSSLSASLGDRVTISCRASQDISKYLNWYQQKPDGTVKLLIYHTSRLHSGVPSRFSGSGSGTDYSLTISNLEQEDIATYFCQQGNTLPYTFGGGTKLEITGGGGSGGGGSGGGGSEVKLQESGPGLVAPSQSLSVTCTVSGVSLPDYGVSWIRQPPRKGLEWLGVIWGSETTYYNSALKSRLTIIKDNSKSQVFLKMNSLQTDDTAIYYCAKHYYYGGSYAMDYWGQGTSVTVSSTTTPAPRPPTPAPTIASQPLSLRPEACRPAAGGAVHTRGLDFACDIYIWAPLAGTCGVLLLSLVITLYCKRGRKKLLYIFKQPFMRPVQTTQEEDGCSCRFPEEEEGGCELGSEETRELQSLAAAVVPSAQTLKITDFSFSDFELSDLETALCTIRMFTDLNLVQNFQMKHEVLCRWILSVKKNYRKNVAYHNWRHAFNTAQCMFAALKAGKIQNKLTDLEILALLIAALSHDLDHRGVNNSYIQRSEHPLAQLYCHSIMEHHHFDQCLMILNSPGNQILSGLSIEEYKTTLKIIKQAILATDLALYIKRRGEFFELIRKNQFNLEDPHQKELFLAMLMTACDLSAITKPWPIQQRIAELVATEFFDQGDRERKELNIEPTDLMNREKKNKIPSMQVGFIDAICLQLYEALTHVSEDCFPLLDGCRKNRQKWQALAEQQGSRVKFSRSADAPAYKQGQNQLYNELNLGRREEYDVLDKRRGRDPEMGGKPRRKNPQEGLYNELQKDKMAEAYSEIGMKGERRRGKGHDGLYQGLSTATKDTYDALHMQALPPR

SEQ ID NO: 8941 - protein, 814 aa, Artificial Sequence
  source: /note="Description of Artificial Sequence: Synthetic polypeptide"
MALPVTALLLPLALLLHAARPDIQMTQTTSSLSASLGDRVTISCRASQDISKYLNWYQQKPDGTVKLLIYHTSRLHSGVPSRFSGSGSGTDYSLTISNLEQEDIATYFCQQGNTLPYTFGGGTKLEITGGGGSGGGGSGGGGSEVKLQESGPGLVAPSQSLSVTCTVSGVSLPDYGVSWIRQPPRKGLEWLGVIWGSETTYYNSALKSRLTIIKDNSKSQVFLKMNSLQTDDTAIYYCAKHYYYGGSYAMDYWGQGTSVTVSSTTTPAPRPPTPAPTIASQPLSLRPEACRPAAGGAVHTRGLDFACDIYIWAPLAGTCGVLLLSLVITLYCKRGRKKLLYIFKQPFMRPVQTTQEEDGCSCRFPEEEEGGCELRVKFSRSADAPAYKQGQNQLYNELNLGRREEYDVLDKRRGRDPEMGGKPRRKNPQEGLYNELQKDKMAEAYSEIGMKGERRRGKGHDGLYQGLSTATKDTYDALHMQALPPRGSEETRELQSLAAAVVPSAQTLKITDFSFSDFELSDLETALCTIRMFTDLNLVQNFQMKHEVLCRWILSVKKNYRKNVAYHNWRHAFNTAQCMFAALKAGKIQNKLTDLEILALLIAALSHDLDHRGVNNSYIQRSEHPLAQLYCHSIMEHHHFDQCLMILNSPGNQILSGLSIEEYKTTLKIIKQAILATDLALYIKRRGEFFELIRKNQFNLEDPHQKELFLAMLMTACDLSAITKPWPIQQRIAELVATEFFDQGDRERKELNIEPTDLMNREKKNKIPSMQVGFIDAICLQLYEALTHVSEDCFPLLDGCRKNRQKWQALAEQQ

SEQ ID NO: 8942 - protein, 814 aa, Artificial Sequence
  source: /note="Description of Artificial Sequence: Synthetic polypeptide"
MALPVTALLLPLALLLHAARPDIQMTQTTSSLSASLGDRVTISCRASQDISKYLNWYQQKPDGTVKLLIYHTSRLHSGVPSRFSGSGSGTDYSLTISNLEQEDIATYFCQQGNTLPYTFGGGTKLEITGGGGSGGGGSGGGGSEVKLQESGPGLVAPSQSLSVTCTVSGVSLPDYGVSWIRQPPRKGLEWLGVIWGSETTYYNSALKSRLTIIKDNSKSQVFLKMNSLQTDDTAIYYCAKHYYYGGSYAMDYWGQGTSVTVSSTTTPAPRPPTPAPTIASQPLSLRPEACRPAAGGAVHTRGLDFACDIYIWAPLAGTCGVLLLSLVITLYCKRGRKKLLYIFKQPFMRPVQTTQEEDGCSCRFPEEEEGGCELRVKFSRSADAPAYKQGQNQLYNELNLGRREEYDVLDKRRGRDPEMGGKPRRKNPQEGLYNELQKDKMAEAYSEIGMKGERRRGKGHDGLYQGLSTATKDTYDALHMQALPPRGSEETRELQSLAAAVVPSAQTLKITDFSFSDFELSDLETALCTIRMFTDLNLVQNFQMKHEVLCRWILSVKKNYRKNVAYHNWRHAFNTAQCMFAALKAGKIQNKLTDLEILALLIAALSHDLDHRGVNNSYIQRSEHPLAQLYCHSIMEHHHFDQCLMILNSPGNQILSGLSIEEYKTTLKIIKQAILATDLALYIKRLGEFAELIRKNQFNLEDPHQKELFLAMLMTACDLSAITKPWPIQQRIAELVATEFFDQGDRERKELNIEPTDLMNREKKNKIPSMQVGFIDAICLQLYEALTHVSEDCFPLLDGCRKNRQKWQALAEQQ

SEQ ID NO: 8943 - protein, 816 aa, Artificial Sequence
  source: /note="Description of Artificial Sequence: Synthetic polypeptide"
MALPVTALLLPLALLLHAARPDIQMTQTTSSLSASLGDRVTISCRASQDISKYLNWYQQKPDGTVKLLIYHTSRLHSGVPSRFSGSGSGTDYSLTISNLEQEDIATYFCQQGNTLPYTFGGGTKLEITGGGGSGGGGSGGGGSEVKLQESGPGLVAPSQSLSVTCTVSGVSLPDYGVSWIRQPPRKGLEWLGVIWGSETTYYNSALKSRLTIIKDNSKSQVFLKMNSLQTDDTAIYYCAKHYYYGGSYAMDYWGQGTSVTVSSTTTPAPRPPTPAPTIASQPLSLRPEACRPAAGGAVHTRGLDFACDIYIWAPLAGTCGVLLLSLVITLYCKRGRKKLLYIFKQPFMRPVQTTQEEDGCSCRFPEEEEGGCELGSEETRELQSLAAAVVPSAQTLKITDFSFSDFELSDLETALCTIRMFTDLNLVQNFQMKHEVLCRWILSVKKNYRKNVAYHNWRHAFNTAQCMFAALKAGKIQNKLTDLEILALLIAALSHDLDHRGVNNSYIQRSEHPLAQLYCHSIMEHHHFDQCLMILNSPGNQILSGLSIEEYKTTLKIIKQAILATDLALYIKRLGEFAELIRKNQFNLEDPHQKELFLAMLMTACDLSAITKPWPIQQRIAELVATEFFDQGDRERKELNIEPTDLMNREKKNKIPSMQVGFIDAICLQLYEALTHVSEDCFPLLDGCRKNRQKWQALAEQQGSRVKFSRSADAPAYKQGQNQLYNELNLGRREEYDVLDKRRGRDPEMGGKPRRKNPQEGLYNELQKDKMAEAYSEIGMKGERRRGKGHDGLYQGLSTATKDTYDALHMQALPPR

SEQ ID NO: 8944 - protein, 749 aa, Artificial Sequence
  source: /note="Description of Artificial Sequence: Synthetic polypeptide"
MALPVTALLLPLALLLHAARPDIQMTQTTSSLSASLGDRVTISCRASQDISKYLNWYQQKPDGTVKLLIYHTSRLHSGVPSRFSGSGSGTDYSLTISNLEQEDIATYFCQQGNTLPYTFGGGTKLEITGGGGSGGGGSGGGGSEVKLQESGPGLVAPSQSLSVTCTVSGVSLPDYGVSWIRQPPRKGLEWLGVIWGSETTYYNSALKSRLTIIKDNSKSQVFLKMNSLQTDDTAIYYCAKHYYYGGSYAMDYWGQGTSVTVSSTTTPAPRPPTPAPTIASQPLSLRPEACRPAAGGAVHTRGLDFACDIYIWAPLAGTCGVLLLSLVITLYCKRGRKKLLYIFKQPFMRPVQTTQEEDGCSCRFPEEEEGGCELRVKFSRSADAPAYKQGQNQLYNELNLGRREEYDVLDKRRGRDPEMGGKPRRKNPQEGLYNELQKDKMAEAYSEIGMKGERRRGKGHDGLYQGLSTATKDTYDALHMQALPPRGSGATNFSLLKQAGDVEENPGPGSGVSKGEELFTGVVPILVELDGDVNGHKFSVSGEGEGDATYGKLTLKFICTTGKLPVPWPTLVTTLTYGVQCFSRYPDHMKQHDFFKSAMPEGYVQERTIFFKDDGNYKTRAEVKFEGDTLVNRIELKGIDFKEDGNILGHKLEYNYNSHNVYIMADKQKNGIKVNFKIRHNIEDGSVQLADHYQQNTPIGDGPVLLPDNHYLSTQSALSKDPNEKRDHMVLLEFVTAAGITLGMDELYK

SEQ ID NO: 8945 - protein, 1058 aa, Artificial Sequence
  source: /note="Description of Artificial Sequence: Synthetic polypeptide"
MALPVTALLLPLALLLHAARPDIQMTQTTSSLSASLGDRVTISCRASQDISKYLNWYQQKPDGTVKLLIYHTSRLHSGVPSRFSGSGSGTDYSLTISNLEQEDIATYFCQQGNTLPYTFGGGTKLEITGGGGSGGGGSGGGGSEVKLQESGPGLVAPSQSLSVTCTVSGVSLPDYGVSWIRQPPRKGLEWLGVIWGSETTYYNSALKSRLTIIKDNSKSQVFLKMNSLQTDDTAIYYCAKHYYYGGSYAMDYWGQGTSVTVSSTTTPAPRPPTPAPTIASQPLSLRPEACRPAAGGAVHTRGLDFACDIYIWAPLAGTCGVLLLSLVITLYCKRGRKKLLYIFKQPFMRPVQTTQEEDGCSCRFPEEEEGGCELRVKFSRSADAPAYKQGQNQLYNELNLGRREEYDVLDKRRGRDPEMGGKPRRKNPQEGLYNELQKDKMAEAYSEIGMKGERRRGKGHDGLYQGLSTATKDTYDALHMQALPPRGSGATNFSLLKQAGDVEENPGPMEDAKNIKKGPAPFYPLEDGTAGEQLHKAMKRYALVPGTIAFTDAHIEVDITYAEYFEMSVRLAEAMKRYGLNTNHRIVVCSENSLQFFMPVLGALFIGVAVAPANDIYNERELLNSMGISQPTVVFVSKKGLQKILNVQKKLPIIQKIIIMDSKTDYQGFQSMYTFVTSHLPPGFNEYDFVPESFDRDKTIALIMNSSGSTGLPKGVALPHRTACVRFSHARDPIFGNQIIPDTAILSVVPFHHGFGMFTTLGYLICGFRVVLMYRFEEELFLRSLQDYKIQSALLVPTLFSFFAKSTLIDKYDLSNLHEIASGGAPLSKEVGEAVAKRFHLPGIRQGYGLTETTSAILITPEGDDKPGAVGKVVPFFEAKVVDLDTGKTLGVNQRGELCVRGPMIMSGYVNNPEATNALIDKDGWLHSGDIAYWDEDEHFFIVDRLKSLIKYKGYQVAPAELESILLQHPNIFDAGVAGLPDDDAGELPAAVVVLEHGKTMTEKEIVDYVASQVTTAKKLRGGVVFVDEVPKGLTGKLDARKIREILIKAKKGGKIAV

SEQ ID NO: 8946 - protein, 823 aa, Artificial Sequence
  source: /note="Description of Artificial Sequence: Synthetic polypeptide"
MALPVTALLLPLALLLHAARPYPYDVPDYADIQMTQTTSSLSASLGDRVTISCRASQDISKYLNWYQQKPDGTVKLLIYHTSRLHSGVPSRFSGSGSGTDYSLTISNLEQEDIATYFCQQGNTLPYTFGGGTKLEITGGGGSGGGGSGGGGSEVKLQESGPGLVAPSQSLSVTCTVSGVSLPDYGVSWIRQPPRKGLEWLGVIWGSETTYYNSALKSRLTIIKDNSKSQVFLKMNSLQTDDTAIYYCAKHYYYGGSYAMDYWGQGTSVTVSSTTTPAPRPPTPAPTIASQPLSLRPEACRPAAGGAVHTRGLDFACDIYIWAPLAGTCGVLLLSLVITLYCKRGRKKLLYIFKQPFMRPVQTTQEEDGCSCRFPEEEEGGCELRVKFSRSADAPAYKQGQNQLYNELNLGRREEYDVLDKRRGRDPEMGGKPRRKNPQEGLYNELQKDKMAEAYSEIGMKGERRRGKGHDGLYQGLSTATKDTYDALHMQALPPRSGEETRELQSLAAAVVPSAQTLKITDFSFSDFELSDLETALCTIRMFTDLNLVQNFQMKHEVLCRWILSVKKNYRKNVAYHNWRHAFNTAQCMFAALKAGKIQNKLTDLEILALLIAALSHDLDHRGVNNSYIQRSEHPLAQLYCHSIMEHHHFDQCLMILNSPGNQILSGLSIEEYKTTLKIIKQAILATDLALYIKRRGEFFELIRKNQFNLEDPHQKELFLATLMTACDLSAITKPWPIQQRIAELVATEFFDQGDRERKELNIEPTDLMNREKKNKIPSMQVGFIDAICLQLYEALTHVSEDCFPLLDGCRKNRQKWQALAEQQ

SEQ ID NO: 8947 - protein, 823 aa, Artificial Sequence
  source: /note="Description of Artificial Sequence: Synthetic polypeptide"
MALPVTALLLPLALLLHAARPYPYDVPDYADIQMTQTTSSLSASLGDRVTISCRASQDISKYLNWYQQKPDGTVKLLIYHTSRLHSGVPSRFSGSGSGTDYSLTISNLEQEDIATYFCQQGNTLPYTFGGGTKLEITGGGGSGGGGSGGGGSEVKLQESGPGLVAPSQSLSVTCTVSGVSLPDYGVSWIRQPPRKGLEWLGVIWGSETTYYNSALKSRLTIIKDNSKSQVFLKMNSLQTDDTAIYYCAKHYYYGGSYAMDYWGQGTSVTVSSTTTPAPRPPTPAPTIASQPLSLRPEACRPAAGGAVHTRGLDFACDIYIWAPLAGTCGVLLLSLVITLYCKRGRKKLLYIFKQPFMRPVQTTQEEDGCSCRFPEEEEGGCELRVKFSRSADAPAYKQGQNQLYNELNLGRREEYDVLDKRRGRDPEMGGKPRRKNPQEGLYNELQKDKMAEAYSEIGMKGERRRGKGHDGLYQGLSTATKDTYDALHMQALPPRSGEETRELQSLAAAVVPSAQTLKITDFSFSDFELSDLETALCTIRMFTDLNLVQNFQMKHEVLCRWILSVKKNYRKNVAYHNWRHAFNTAQCMFAALKAGKIQNKLTDLEILALLIAALSHDLDHRGVNNSYIQRSEHPLAQLYCHSIMEHHHFDQCLMILNSPGNQILSGLSIEEYKTTLKIIKQAILATDLALYIKRRGEFFELIRKNQFNLEDPHQEELFLAMLMTACDLSAITKPWPIQQRIAELVATEFFDQGDRERKELNIEPTDLMNREKKNKIPSMQVGFIDAICLQLYEALTHVSEDCFPLLDGCRKNRQKWQALAEQQ

SEQ ID NO: 8948 - protein, 823 aa, Artificial Sequence
  source: /note="Description of Artificial Sequence: Synthetic polypeptide"
MALPVTALLLPLALLLHAARPYPYDVPDYADIQMTQTTSSLSASLGDRVTISCRASQDISKYLNWYQQKPDGTVKLLIYHTSRLHSGVPSRFSGSGSGTDYSLTISNLEQEDIATYFCQQGNTLPYTFGGGTKLEITGGGGSGGGGSGGGGSEVKLQESGPGLVAPSQSLSVTCTVSGVSLPDYGVSWIRQPPRKGLEWLGVIWGSETTYYNSALKSRLTIIKDNSKSQVFLKMNSLQTDDTAIYYCAKHYYYGGSYAMDYWGQGTSVTVSSTTTPAPRPPTPAPTIASQPLSLRPEACRPAAGGAVHTRGLDFACDIYIWAPLAGTCGVLLLSLVITLYCKRGRKKLLYIFKQPFMRPVQTTQEEDGCSCRFPEEEEGGCELRVKFSRSADAPAYKQGQNQLYNELNLGRREEYDVLDKRRGRDPEMGGKPRRKNPQEGLYNELQKDKMAEAYSEIGMKGERRRGKGHDGLYQGLSTATKDTYDALHMQALPPRSGEETRELQSLAAAVVPSAQTLKITDFSFSDFELSDLETALCTIRMFTDLNLVQNFQMKHEVLCRWILSVKKNYRKNVAYHNWRHAFNTAQCMFAALKAGKIQNKLTDLEILALLIAALSHDLDHRGVNNSYIQRSEHPLAQLYYHSIMEHHRFDQCLMILNSPGNQILSGLSIEEYKTTLKIIKQAILVTDLALYIKRRGEFFELIRKNQFNLEDPHQKELFLAMLMTACDLSAITKPWPIQQRIAELVATEFFDQGDRERKELNIEPTDLMNREKKNKIPSMQVGFIDAICLQLYEALTHVSEDCFPLLDGCRKNRQKWQALAEQQ

SEQ ID NO: 8949 - protein, 823 aa, Artificial Sequence
  source: /note="Description of Artificial Sequence: Synthetic polypeptide"
MALPVTALLLPLALLLHAARPYPYDVPDYADIQMTQTTSSLSASLGDRVTISCRASQDISKYLNWYQQKPDGTVKLLIYHTSRLHSGVPSRFSGSGSGTDYSLTISNLEQEDIATYFCQQGNTLPYTFGGGTKLEITGGGGSGGGGSGGGGSEVKLQESGPGLVAPSQSLSVTCTVSGVSLPDYGVSWIRQPPRKGLEWLGVIWGSETTYYNSALKSRLTIIKDNSKSQVFLKMNSLQTDDTAIYYCAKHYYYGGSYAMDYWGQGTSVTVSSTTTPAPRPPTPAPTIASQPLSLRPEACRPAAGGAVHTRGLDFACDIYIWAPLAGTCGVLLLSLVITLYCKRGRKKLLYIFKQPFMRPVQTTQEEDGCSCRFPEEEEGGCELRVKFSRSADAPAYKQGQNQLYNELNLGRREEYDVLDKRRGRDPEMGGKPRRKNPQEGLYNELQKDKMAEAYSEIGMKGERRRGKGHDGLYQGLSTATKDTYDALHMQALPPRSGEETRELQSLAAAVVPSAQTLKITDFSFSDFELSDLETALCTIRMFTDLNLVQNFQMKHEVLCRWILSVKKNYRKNVAYHNWRHAFNTAQCMFAALKAGKIQNKLSDLEILALLIAALSHDLDHRGVNNSYIQRSEHPLAQLYCHSIMEHHHFDQCLMILNSPGNQILSGLSIEEYKTTLKIIKQAILATDLALYIKRRGEFFELIRKNQFNLEDPHQKELFLAMLMTACDLSAITKPWPIQQRIAELVATEFFDQGDRERKELNIEPTDLMNREKKNKIPSRQVGFIDAICLQLYEALTHVSEDCFPLLDGCRKNRQKWQALAEQQ

SEQ ID NO: 8950 - protein, 823 aa, Artificial Sequence
  source: /note="Description of Artificial Sequence: Synthetic polypeptide"
MALPVTALLLPLALLLHAARPYPYDVPDYADIQMTQTTSSLSASLGDRVTISCRASQDISKYLNWYQQKPDGTVKLLIYHTSRLHSGVPSRFSGSGSGTDYSLTISNLEQEDIATYFCQQGNTLPYTFGGGTKLEITGGGGSGGGGSGGGGSEVKLQESGPGLVAPSQSLSVTCTVSGVSLPDYGVSWIRQPPRKGLEWLGVIWGSETTYYNSALKSRLTIIKDNSKSQVFLKMNSLQTDDTAIYYCAKHYYYGGSYAMDYWGQGTSVTVSSTTTPAPRPPTPAPTIASQPLSLRPEACRPAAGGAVHTRGLDFACDIYIWAPLAGTCGVLLLSLVITLYCKRGRKKLLYIFKQPFMRPVQTTQEEDGCSCRFPEEEEGGCELRVKFSRSADAPAYKQGQNQLYNELNLGRREEYDVLDKRRGRDPEMGGKPRRKNPQEGLYNELQKDKMAEAYSEIGMKGERRRGKGHDGLYQGLSTATKDTYDALHMQALPPRSGEEARELQSLAAAVVPSAQTLKITGFSFSDFELSDLETALCTIRMFTDLNLVQNFQMKHEVLCRWILSVKKNYRKNVAYHNWRHAFNTAQCMFAALKAGKIQNKLTDLEILALLIAALSHDLDHRGVNNSYIQRSEHPLAQLYCHSIMEHHHFDQCLMILNSPGNQILSGLSTEEYKTTLKIIKQAILATDLALYIKRRGEFFELIRKNQLNLEDPHQKELFLAMLMTACNLSAITKPWPIQQRIAELVATEFFDQGDRERKELNIEPTDLMNREKKNKIPSMQVGFIDAICLQLYEALTHVSEDCFPLLDGCRKNRQKWQALAEQQ

SEQ ID NO: 8951 - protein, 823 aa, Artificial Sequence
  source: /note="Description of Artificial Sequence: Synthetic polypeptide"
MALPVTALLLPLALLLHAARPYPYDVPDYADIQMTQTTSSLSASLGDRVTISCRASQDISKYLNWYQQKPDGTVKLLIYHTSRLHSGVPSRFSGSGSGTDYSLTISNLEQEDIATYFCQQGNTLPYTFGGGTKLEITGGGGSGGGGSGGGGSEVKLQESGPGLVAPSQSLSVTCTVSGVSLPDYGVSWIRQPPRKGLEWLGVIWGSETTYYNSALKSRLTIIKDNSKSQVFLKMNSLQTDDTAIYYCAKHYYYGGSYAMDYWGQGTSVTVSSTTTPAPRPPTPAPTIASQPLSLRPEACRPAAGGAVHTRGLDFACDIYIWAPLAGTCGVLLLSLVITLYCKRGRKKLLYIFKQPFMRPVQTTQEEDGCSCRFPEEEEGGCELRVKFSRSADAPAYKQGQNQLYNELNLGRREEYDVLDKRRGRDPEMGGKPRRKNPQEGLYNELQKDKMAEAYSEIGMKGERRRGKGHDGLYQGLSTATKDTYDALHMQALPPRSGEETRELQSLAAAVVPSAQTLKITDFSFSDFELSDLETALCTIRMFTDLNLVRNFQMKHEVLCRWILSVKKNYRKNVAYHNWRHAFNTAQCMFAALKAGKIQNKLTDLEILALLIAALSHDLDHRGVNNSYIQRSEHPLAQLYCHSIMEHHHFDQCLMILNSPGNQILSGLSIEEYKTTLKIIKQAILATGLALYIKRRGEFFELIRKNQFNLEDPHQKELFLAMLMTACDLSAITKPWPIQQRIAELVATEFFDQGDRERKELNIEPTDLMNREKKNKIPSMQVGFIDAICLQLYEALTHVSEDCFPLLDGCRKNRQKWQALAEQQ

SEQ ID NO: 8952 - protein, 823 aa, Artificial Sequence
  source: /note="Description of Artificial Sequence: Synthetic polypeptide"
MALPVTALLLPLALLLHAARPYPYDVPDYADIQMTQTTSSLSASLGDRVTISCRASQDISKYLNWYQQKPDGTVKLLIYHTSRLHSGVPSRFSGSGSGTDYSLTISNLEQEDIATYFCQQGNTLPYTFGGGTKLEITGGGGSGGGGSGGGGSEVKLQESGPGLVAPSQSLSVTCTVSGVSLPDYGVSWIRQPPRKGLEWLGVIWGSETTYYNSALKSRLTIIKDNSKSQVFLKMNSLQTDDTAIYYCAKHYYYGGSYAMDYWGQGTSVTVSSTTTPAPRPPTPAPTIASQPLSLRPEACRPAAGGAVHTRGLDFACDIYIWAPLAGTCGVLLLSLVITLYCKRGRKKLLYIFKQPFMRPVQTTQEEDGCSCRFPEEEEGGCELRVKFSRSADAPAYKQGQNQLYNELNLGRREEYDVLDKRRGRDPEMGGKPRRKNPQEGLYNELQKDKMAEAYSEIGMKGERRRGKGHDGLYQGLSTATKDTYDALHMQALPPRSGEETRELQSLAAAVVPSAQTLKITDFSFSDFELSDLETALCTIRMFTDLNLVQNFQMKHEVLCRWILSVKKNYRKNVAYHNWRHAFNTAQCMFAALKAGKIQNKLTDLEILALLIAALSHDLDHRGVNNSYIQRSEHPLAQLYCHSIMEHHHSDQCLMILNSPGNQILSGLSIEEYKTTLKIIKQAILATDLALYIKRRGEFFELIRKNQFNLEDPHQKELFLAMLMTACDLSAITKPWPIQQRIAELVATEFFDQGDRERKELNIEPTDLMNREKKNKIPSMQVGFIDAICLQLYEALTHVSEDCFPLLDGCRKNRQKWQALAEQQ

SEQ ID NO: 8953 - protein, 823 aa, Artificial Sequence
  source: /note="Description of Artificial Sequence: Synthetic polypeptide"
MALPVTALLLPLALLLHAARPYPYDVPDYADIQMTQTTSSLSASLGDRVTISCRASQDISKYLNWYQQKPDGTVKLLIYHTSRLHSGVPSRFSGSGSGTDYSLTISNLEQEDIATYFCQQGNTLPYTFGGGTKLEITGGGGSGGGGSGGGGSEVKLQESGPGLVAPSQSLSVTCTVSGVSLPDYGVSWIRQPPRKGLEWLGVIWGSETTYYNSALKSRLTIIKDNSKSQVFLKMNSLQTDDTAIYYCAKHYYYGGSYAMDYWGQGTSVTVSSTTTPAPRPPTPAPTIASQPLSLRPEACRPAAGGAVHTRGLDFACDIYIWAPLAGTCGVLLLSLVITLYCKRGRKKLLYIFKQPFMRPVQTTQEEDGCSCRFPEEEEGGCELRVKFSRSADAPAYKQGQNQLYNELNLGRREEYDVLDKRRGRDPEMGGKPRRKNPQEGLYNELQKDKMAEAYSEIGMKGERRRGKGHDGLYQGLSTATKDTYDALHMQALPPRSGEETRGLQSLAAAVVPSAQTLKITDFSFSDFELSDLETALCTIRMFTDLNLVQNFQMKHEVLCRWILSVKKNYRKNVAYHNWRHAFNTAQCMFAALKAGKIQNKLTDLEILALLIAALSHDLDHRGVNNSYIQRSEHPLAQLYCHSIMEHHHFDQCLMILNSPGNQILSGLSIEEYKTTLKIIKQAILATDLALYIKRRGEFFEIIRKNQFNLEDPHQKELFLAMLMTACDLSAITKPWPIQQRIAELVATEFFDQGDRERKELNIEPTDLMNREKKNKIPSMQVGFIDAICLQLYEALTHVSEDCFPLLDGCRKNRQKWQALAEQQ

SEQ ID NO: 8954 - protein, 823 aa, Artificial Sequence
  source: /note="Description of Artificial Sequence: Synthetic polypeptide"
MALPVTALLLPLALLLHAARPYPYDVPDYADIQMTQTTSSLSASLGDRVTISCRASQDISKYLNWYQQKPDGTVKLLIYHTSRLHSGVPSRFSGSGSGTDYSLTISNLEQEDIATYFCQQGNTLPYTFGGGTKLEITGGGGSGGGGSGGGGSEVKLQESGPGLVAPSQSLSVTCTVSGVSLPDYGVSWIRQPPRKGLEWLGVIWGSETTYYNSALKSRLTIIKDNSKSQVFLKMNSLQTDDTAIYYCAKHYYYGGSYAMDYWGQGTSVTVSSTTTPAPRPPTPAPTIASQPLSLRPEACRPAAGGAVHTRGLDFACDIYIWAPLAGTCGVLLLSLVITLYCKRGRKKLLYIFKQPFMRPVQTTQEEDGCSCRFPEEEEGGCELRVKFSRSADAPAYKQGQNQLYNELNLGRREEYDVLDKRRGRDPEMGGKPRRKNPQEGLYNELQKDKMAEAYSEIGMKGERRRGKGHDGLYQGLSTATKDTYDALHMQALPPRSGEETRELQSLAAAVVPSAQTLKITDFSFSDFELSDLETALCTIRMFTDLNLVQNFQMKHEVLCRWILSVKKNYRKNVAYHNWRHAFNTAQCMFAALKAGKIRNKLTDLEILALLIAALSHDLDHRGVNNSYIQRSEHPLAQLYCHSIMEHHHFDQCLMILNSPGNQILSGLSIEEYKTTLKIIKQAILATDLALYIKRRGEFFELIRKNQFNLEDPHQKKLFLAMLMTACDLSAITKPWPIQQRIAELVATEFFDQGDRERKELNIEPTDLMNREKKNKTPSMQVGFIDAICLQLYEALTHVSEDCFPLLDGCRKNRQKWQALAEQQ

SEQ ID NO: 8955 - protein, 823 aa, Artificial Sequence
  source: /note="Description of Artificial Sequence: Synthetic polypeptide"
MALPVTALLLPLALLLHAARPYPYDVPDYADIQMTQTTSSLSASLGDRVTISCRASQDISKYLNWYQQKPDGTVKLLIYHTSRLHSGVPSRFSGSGSGTDYSLTISNLEQEDIATYFCQQGNTLPYTFGGGTKLEITGGGGSGGGGSGGGGSEVKLQESGPGLVAPSQSLSVTCTVSGVSLPDYGVSWIRQPPRKGLEWLGVIWGSETTYYNSALKSRLTIIKDNSKSQVFLKMNSLQTDDTAIYYCAKHYYYGGSYAMDYWGQGTSVTVSSTTTPAPRPPTPAPTIASQPLSLRPEACRPAAGGAVHTRGLDFACDIYIWAPLAGTCGVLLLSLVITLYCKRGRKKLLYIFKQPFMRPVQTTQEEDGCSCRFPEEEEGGCELRVKFSRSADAPAYKQGQNQLYNELNLGRREEYDVLDKRRGRDPEMGGKPRRKNPQEGLYNELQKDKMAEAYSEIGMKGERRRGKGHDGLYQGLSTATKDTYDALHMQALPPRSGEETRELQSLAAAVVPSAQTLKITDFSFSDFELSDLETALCTIRMFTDLNLVQNFQMKHEVLCRWILSVKKNYRKNVAYHNWRHAFNTAQCMFAALKAGKIQNKLTDLEILALLIAALSHDLDHRGVNNSYIQRSEHPPAQLYCHSIMEHHHFDQCLMILNSPGNQILSGLSIEEYKTTLKIIKQAILATDLALYIKRRGEFFELIRKNQFNLEDPHQKELFLAMLMTACDLSAITKPWPIQQRIAELVATEFFDQGDRERKELNIEPTDLMNREKKNKIPSMQVGFIDAICLQLYEALTHVLEDCFPLLDGCRKNRQKWQALAEQQ

SEQ ID NO: 8956 - protein, 823 aa, Artificial Sequence
  source: /note="Description of Artificial Sequence: Synthetic polypeptide"
MALPVTALLLPLALLLHAARPYPYDVPDYADIQMTQTTSSLSASLGDRVTISCRASQDISKYLNWYQQKPDGTVKLLIYHTSRLHSGVPSRFSGSGSGTDYSLTISNLEQEDIATYFCQQGNTLPYTFGGGTKLEITGGGGSGGGGSGGGGSEVKLQESGPGLVAPSQSLSVTCTVSGVSLPDYGVSWIRQPPRKGLEWLGVIWGSETTYYNSALKSRLTIIKDNSKSQVFLKMNSLQTDDTAIYYCAKHYYYGGSYAMDYWGQGTSVTVSSTTTPAPRPPTPAPTIASQPLSLRPEACRPAAGGAVHTRGLDFACDIYIWAPLAGTCGVLLLSLVITLYCKRGRKKLLYIFKQPFMRPVQTTQEEDGCSCRFPEEEEGGCELRVKFSRSADAPAYKQGQNQLYNELNLGRREEYDVLDKRRGRDPEMGGKPRRKNPQEGLYNELQKDKMAEAYSEIGMKGERRRGKGHDGLYQGLSTATKDTYDALHMQALPPRSGEETRELQSLAAAVVPSAQTLKITDFSFSDFELSDLETALCTIRMFTDLNLVQNFQMKHEVLCRWILSVKKNYRKNVAYHNWRHAFNTAQCMFAALKAGKIQNKLTDLEILALLIAALSHDLDHRGVNNSYIQRSEHPLAQLYCHSIMEHHHFDQCLTILNSPGNQILSGLSIEEYKTTLKIIKQAILATDLALYIKRRGEFFELIRKNQFNLEDPHQKELFLAMLMTACNLSAITKPWPIQQRIAELVATEFFDQGDRERKELNIEPTDLMNREKKNKIPSMQVGFIDAICLQLYEALTHVSEDCFPLLDGCRKNRQKWQALAEQQ

SEQ ID NO: 8957 - protein, 823 aa, Artificial Sequence
  source: /note="Description of Artificial Sequence: Synthetic polypeptide"
MALPVTALLLPLALLLHAARPYPYDVPDYADIQMTQTTSSLSASLGDRVTISCRASQDISKYLNWYQQKPDGTVKLLIYHTSRLHSGVPSRFSGSGSGTDYSLTISNLEQEDIATYFCQQGNTLPYTFGGGTKLEITGGGGSGGGGSGGGGSEVKLQESGPGLVAPSQSLSVTCTVSGVSLPDYGVSWIRQPPRKGLEWLGVIWGSETTYYNSALKSRLTIIKDNSKSQVFLKMNSLQTDDTAIYYCAKHYYYGGSYAMDYWGQGTSVTVSSTTTPAPRPPTPAPTIASQPLSLRPEACRPAAGGAVHTRGLDFACDIYIWAPLAGTCGVLLLSLVITLYCKRGRKKLLYIFKQPFMRPVQTTQEEDGCSCRFPEEEEGGCELRVKFSRSADAPAYKQGQNQLYNELNLGRREEYDVLDKRRGRDPEMGGKPRRKNPQEGLYNELQKDKMAEAYSEIGMKGERRRGKGHDGLYQGLSTATKDTYDALHMQALPPRSGEETRELQSLAAAVVPSAQTLKITDFSFSDFELSDLETALCTIRMFTDLNLVQNFQMKHEVLCRWILSVKKNYRKNVAYHNWRHAFNTAQCMFAALKAGKIQNKLTDLEILALLIAALSHDLDHRGVNNSYIQRSEHPLAQLYCHSIMEHHHFDQCLMILNSPGNQILSGLSIEEYKTTLKIIKQAILATDLALYIKRRGEFFELIRKNQFNLEDPHQKELFLAMLMTACDLSAITKPWPIQQRIAELVATEFFDQGDRERKELNIEPTDLMNGEKKNKIPSMQVGFIDAICLQLYEALTHVSEDCFPLLDGCRKNRQKWQALAEQQ

SEQ ID NO: 8958 - protein, 823 aa, Artificial Sequence
  source: /note="Description of Artificial Sequence: Synthetic polypeptide"
MALPVTALLLPLALLLHAARPYPYDVPDYADIQMTQTTSSLSASLGDRVTISCRASQDISKYLNWYQQKPDGTVKLLIYHTSRLHSGVPSRFSGSGSGTDYSLTISNLEQEDIATYFCQQGNTLPYTFGGGTKLEITGGGGSGGGGSGGGGSEVKLQESGPGLVAPSQSLSVTCTVSGVSLPDYGVSWIRQPPRKGLEWLGVIWGSETTYYNSALKSRLTIIKDNSKSQVFLKMNSLQTDDTAIYYCAKHYYYGGSYAMDYWGQGTSVTVSSTTTPAPRPPTPAPTIASQPLSLRPEACRPAAGGAVHTRGLDFACDIYIWAPLAGTCGVLLLSLVITLYCKRGRKKLLYIFKQPFMRPVQTTQEEDGCSCRFPEEEEGGCELRVKFSRSADAPAYKQGQNQLYNELNLGRREEYDVLDKRRGRDPEMGGKPRRKNPQEGLYNELQKDKMAEAYSEIGMKGERRRGKGHDGLYQGLSTATKDTYDALHMQALPPRSGEETRELQSLAAAVVPSAQTLKITDFSFSDFELSDLETALCTIQMFTDLNLVQNFQMKHEVLRRWILSVKKNYRKNVAYHNWRHAFNTAQCMFAALKAGKIQNKLTDLEILALLIAALSHDLDHRGANNSYIQRSEHPLAQLYCHSIMEHHHFDQCLMILNSPGNQILSGLSIEEYKTTLKVIKQAILATDLALYIKRRGEFFELIRKNQFNLEDPHQKELFLAMLMTACDLSAITKPWPIQQRIAELVATKFFDQGDRERKELNIEPTDLMNREKKNKIPSMQVGFIDAICLQLYEALTHVSEDCFPLLDGCRKNRQKWQAPAEQQ

SEQ ID NO: 8959 - protein, 823 aa, Artificial Sequence
  source: /note="Description of Artificial Sequence: Synthetic polypeptide"
MALPVTALLLPLALLLHAARPYPYDVPDYADIQMTQTTSSLSASLGDRVTISCRASQDISKYLNWYQQKPDGTVKLLIYHTSRLHSGVPSRFSGSGSGTDYSLTISNLEQEDIATYFCQQGNTLPYTFGGGTKLEITGGGGSGGGGSGGGGSEVKLQESGPGLVAPSQSLSVTCTVSGVSLPDYGVSWIRQPPRKGLEWLGVIWGSETTYYNSALKSRLTIIKDNSKSQVFLKMNSLQTDDTAIYYCAKHYYYGGSYAMDYWGQGTSVTVSSTTTPAPRPPTPAPTIASQPLSLRPEACRPAAGGAVHTRGLDFACDIYIWAPLAGTCGVLLLSLVITLYCKRGRKKLLYIFKQPFMRPVQTTQEEDGCSCRFPEEEEGGCELRVKFSRSADAPAYKQGQNQLYNELNLGRREEYDVLDKRRGRDPEMGGKPRRKNPQEGLYNELQKDKMAEAYSEIGMKGERRRGKGHDGLYQGLSTATKDTYDALHMQALPPRSGEETRELQSLAAAVVPSAQTLKITDFSFSDFELSDLETALCTIRMFTDLNLVQNFQMKHEVLCRWILSVKKNYRKNVAYHNWRHAFNTAQCMFAALKAGKIQNKLTDLEILALLIAALSHDLDHRGVNNSYIQRSEHPLAQLYCHSIMEHHHFDQCLMILNSPGNQILSGLSIEEYKTTLKIIKQAVLATDLALYIKRRGEFFELIRKNQFNLEDPHQKELFLAMLMTACDLSAITKPWPIQQRIAELVATEFFDQGDRERKELNIEPTDLMNREKKNKIPSMQVGSIDAICLQLYEALTHVSEDCFPLLDGCRKNRQKWQALAEQQ

SEQ ID NO: 8960 - protein, 823 aa, Artificial Sequence
  source: /note="Description of Artificial Sequence: Synthetic polypeptide"
MALPVTALLLPLALLLHAARPYPYDVPDYADIQMTQTTSSLSASLGDRVTISCRASQDISKYLNWYQQKPDGTVKLLIYHTSRLHSGVPSRFSGSGSGTDYSLTISNLEQEDIATYFCQQGNTLPYTFGGGTKLEITGGGGSGGGGSGGGGSEVKLQESGPGLVAPSQSLSVTCTVSGVSLPDYGVSWIRQPPRKGLEWLGVIWGSETTYYNSALKSRLTIIKDNSKSQVFLKMNSLQTDDTAIYYCAKHYYYGGSYAMDYWGQGTSVTVSSTTTPAPRPPTPAPTIASQPLSLRPEACRPAAGGAVHTRGLDFACDIYIWAPLAGTCGVLLLSLVITLYCKRGRKKLLYIFKQPFMRPVQTTQEEDGCSCRFPEEEEGGCELRVKFSRSADAPAYKQGQNQLYNELNLGRREEYDVLDKRRGRDPEMGGKPRRKNPQEGLYNELQKDKMAEAYSEIGMKGERRRGKGHDGLYQGLSTATKDTYDALHMQALPPRSGEETRELQSLAAAVVPSAQTLKITDFSFSDFELSDLETALCTIRMFTDLNLVQNFQMKHEVLCRWILSVKKNYRKNVAYHNWRHAFNTAQCMFAALKAGKIQNKLTDLEILALLIAALSHDLDHRGVNNSYIQRSEHPLAQLYCHSIMEHHHFDQCLMILNGPGNQILSGLSIKEYKTTLKIIKQAILATDLALYIKRRGEFFELMRKNQFNLEDPHQKELFLAMLMTARDLSAITKPWPIQQRIAELVATEFFDQGDRERKELNIEPTDLMNREKKNKIPSMQVGFIDAICLQLYEALTHVSEDCFPLLDGCRKNRQKWQALAEQQ

SEQ ID NO: 8961 - protein, 823 aa, Artificial Sequence
  source: /note="Description of Artificial Sequence: Synthetic polypeptide"
MALPVTALLLPLALLLHAARPYPYDVPDYADIQMTQTTSSLSASLGDRVTISCRASQDISKYLNWYQQKPDGTVKLLIYHTSRLHSGVPSRFSGSGSGTDYSLTISNLEQEDIATYFCQQGNTLPYTFGGGTKLEITGGGGSGGGGSGGGGSEVKLQESGPGLVAPSQSLSVTCTVSGVSLPDYGVSWIRQPPRKGLEWLGVIWGSETTYYNSALKSRLTIIKDNSKSQVFLKMNSLQTDDTAIYYCAKHYYYGGSYAMDYWGQGTSVTVSSTTTPAPRPPTPAPTIASQPLSLRPEACRPAAGGAVHTRGLDFACDIYIWAPLAGTCGVLLLSLVITLYCKRGRKKLLYIFKQPFMRPVQTTQEEDGCSCRFPEEEEGGCELRVKFSRSADAPAYKQGQNQLYNELNLGRREEYDVLDKRRGRDPEMGGKPRRKNPQEGLYNELQKDKMAEAYSEIGMKGERRRGKGHDGLYQGLSTATKDTYDALHMQALPPRSGEETRELQSLAAAVVPSAQTLKITDFSFSDFELSDLETALCTIRMFTDLNLVQNFQMKHEVLCRWILSVKKNYRKNVAYHNWRHAFNTAQCMFAALKAGKIQNKLTDLEILALLIAALSHDLDHRGVNNSYIQRSEHPLAQLYCHSIMEHHHFDQCLMILNSPGNQILSGLSIEEHKTTLKIIKQAILATDLALYIKRRGEFFELIRKNQFNLEDPHQKELFLAMLMTACDLSAITKPWPIQQRIAELVATEFFDQGDRERKELNIEPTDLMNREKKNRIPSMQVGFIDAICLQLYEAPTHVSEDCFPLLDGCRKNRQKWQALAEQQ

SEQ ID NO: 8962 - protein, 823 aa, Artificial Sequence
  source: /note="Description of Artificial Sequence: Synthetic polypeptide"
MALPVTALLLPLALLLHAARPYPYDVPDYADIQMTQTTSSLSASLGDRVTISCRASQDISKYLNWYQQKPDGTVKLLIYHTSRLHSGVPSRFSGSGSGTDYSLTISNLEQEDIATYFCQQGNTLPYTFGGGTKLEITGGGGSGGGGSGGGGSEVKLQESGPGLVAPSQSLSVTCTVSGVSLPDYGVSWIRQPPRKGLEWLGVIWGSETTYYNSALKSRLTIIKDNSKSQVFLKMNSLQTDDTAIYYCAKHYYYGGSYAMDYWGQGTSVTVSSTTTPAPRPPTPAPTIASQPLSLRPEACRPAAGGAVHTRGLDFACDIYIWAPLAGTCGVLLLSLVITLYCKRGRKKLLYIFKQPFMRPVQTTQEEDGCSCRFPEEEEGGCELRVKFSRSADAPAYKQGQNQLYNELNLGRREEYDVLDKRRGRDPEMGGKPRRKNPQEGLYNELQKDKMAEAYSEIGMKGERRRGKGHDGLYQGLSTATKDTYDALHMQALPPRSGEETRELQSLAAAVVPSAQTLKITDFSFSDFELSDLETALCTIRMFTDLSLVQNFQMKHEVLCRWILSVKKNYRKNVAYHNWRHAFNTAQCMFAALKAGKIQNKLTDLEILALLIAALSHDLDHRGVNNSYIQRSEHPLAQLYCHSIMEHHHFDQCLMILNSPGNQILSGLSIEEYKTTLKIIKQAILATDLALYIKRRGEFFELIRKNQFNLEDPHQEELFLAMLMTACDLSAITKPWPIQQRIAELVATEFFDQGDRERKELNIEPTDLMNREKKNKIPSMQVGFIDAICLQLYEALTHVSEDCFPLLDGSRKNRQKWQALAEQQ

SEQ ID NO: 8963 - protein, 823 aa, Artificial Sequence
  source: /note="Description of Artificial Sequence: Synthetic polypeptide"
MALPVTALLLPLALLLHAARPYPYDVPDYADIQMTQTTSSLSASLGDRVTISCRASQDISKYLNWYQQKPDGTVKLLIYHTSRLHSGVPSRFSGSGSGTDYSLTISNLEQEDIATYFCQQGNTLPYTFGGGTKLEITGGGGSGGGGSGGGGSEVKLQESGPGLVAPSQSLSVTCTVSGVSLPDYGVSWIRQPPRKGLEWLGVIWGSETTYYNSALKSRLTIIKDNSKSQVFLKMNSLQTDDTAIYYCAKHYYYGGSYAMDYWGQGTSVTVSSTTTPAPRPPTPAPTIASQPLSLRPEACRPAAGGAVHTRGLDFACDIYIWAPLAGTCGVLLLSLVITLYCKRGRKKLLYIFKQPFMRPVQTTQEEDGCSCRFPEEEEGGCELRVKFSRSADAPAYKQGQNQLYNELNLGRREEYDVLDKRRGRDPEMGGKPRRKNPQEGLYNELQKDKMAEAYSEIGMKGERRRGKGHDGLYQGLSTATKDTYDALHMQALPPRSGEETRELQSLAAAVVPSAQTLKITDFSFSDFELSDLETALCTIRMFTDLNLVQNFQMKHEVLCRWILSVKKNYRKNVAYHNWRHAFNTAQCMFAALKAGKIQNKLTDLEILALLIAALSHDLDHRGVNNSYIQRSEHPLAQLYCHSIMGHHHFDQCLMILNSPGNQILSGLSIEEYKTTLKIIKQAILATDLALYIKRRGEFFELIRKNQFNLENPHQKELFLAMLMTACDLSAITKPWPIQQRIAELVATEFFDQGDRERKELNIEPTDLMNREKKNKIPSMQVGFIDAICLQLYEALTHVSEDCFPLLDGCRKNRQKWQALAEQQ

SEQ ID NO: 8964 - protein, 823 aa, Artificial Sequence
  source: /note="Description of Artificial Sequence: Synthetic polypeptide"
MALPVTALLLPLALLLHAARPYPYDVPDYADIQMTQTTSSLSASLGDRVTISCRASQDISKYLNWYQQKPDGTVKLLIYHTSRLHSGVPSRFSGSGSGTDYSLTISNLEQEDIATYFCQQGNTLPYTFGGGTKLEITGGGGSGGGGSGGGGSEVKLQESGPGLVAPSQSLSVTCTVSGVSLPDYGVSWIRQPPRKGLEWLGVIWGSETTYYNSALKSRLTIIKDNSKSQVFLKMNSLQTDDTAIYYCAKHYYYGGSYAMDYWGQGTSVTVSSTTTPAPRPPTPAPTIASQPLSLRPEACRPAAGGAVHTRGLDFACDIYIWAPLAGTCGVLLLSLVITLYCKRGRKKLLYIFKQPFMRPVQTTQEEDGCSCRFPEEEEGGCELRVKFSRSADAPAYKQGQNQLYNELNLGRREEYDVLDKRRGRDPEMGGKPRRKNPQEGLYNELQKDKMAEAYSEIGMKGERRRGKGHDGLYQGLSTATKDTYDALHMQALPPRSGEETRELQSLAAAVVPSAQTLKITDFSFSDFELSDLETALCTIRMFTDLNLVQNFQMRHEVLCRWILSVKKNYRKNVAYHNWRHAFNTAQCMFAALKAGKIQNKLTDLETLALLIAALSHDLDHRGVNNSYIQRSEHPLAQLYCHSIMEHHHFDQCLMILNSPGNQILSGLSIEEYKTTLKIIKQAILATDLALYIKRRGEFFELIRKNQFNLEDPHQKELFLAMLMTACDLSAITKPWPIQQRIAELVATEFFDQGDRERKELNIEPTDLMNREKKNKIPSMQVGFIDAICLQLYEALTHVSEDCFPLLDGCRKNRQKWQAPAEQQ

SEQ ID NO: 8965 - protein, 823 aa, Artificial Sequence
  source: /note="Description of Artificial Sequence: Synthetic polypeptide"
MALPVTALLLPLALLLHAARPYPYDVPDYADIQMTQTTSSLSASLGDRVTISCRASQDISKYLNWYQQKPDGTVKLLIYHTSRLHSGVPSRFSGSGSGTDYSLTISNLEQEDIATYFCQQGNTLPYTFGGGTKLEITGGGGSGGGGSGGGGSEVKLQESGPGLVAPSQSLSVTCTVSGVSLPDYGVSWIRQPPRKGLEWLGVIWGSETTYYNSALKSRLTIIKDNSKSQVFLKMNSLQTDDTAIYYCAKHYYYGGSYAMDYWGQGTSVTVSSTTTPAPRPPTPAPTIASQPLSLRPEACRPAAGGAVHTRGLDFACDIYIWAPLAGTCGVLLLSLVITLYCKRGRKKLLYIFKQPFMRPVQTTQEEDGCSCRFPEEEEGGCELRVKFSRSADAPAYKQGQNQLYNELNLGRREEYDVLDKRRGRDPEMGGKPRRKNPQEGLYNELQKDKMAEAYSEIGMKGERRRGKGHDGLYQGLSTATKDTYDALHMQALPPRSGEETRELQSLAAAVVPSAQTLKITDFSFSDFELSDLETALCTIRMFTDLNLVQNFQMKHEVLCRWILSVKKNYRKNVAYHNWRHASNTAQCMFAALKAGKIQNKLTDLEILALLIAALSHDLDHRGVNNSYIQRSEHPLAQLYCHSIMEHHHFDQCLMILNSPGNQILSGLSIEEYKTTLKIIKQAILATDLALYIKRRGEFFELIRKNQFNLEDPHQKELFLAMLMTACDLSAITKPWPIQQRIAELVATEFFDQGDRERKELNIEPTDLMNREKKNKIPSMQAGFIDAICLQLCEALTHVSEDCFPLLDGCRKNRQKWQALAEQQ

SEQ ID NO: 8966 - protein, 823 aa, Artificial Sequence
  source: /note="Description of Artificial Sequence: Synthetic polypeptide"
MALPVTALLLPLALLLHAARPYPYDVPDYADIQMTQTTSSLSASLGDRVTISCRASQDISKYLNWYQQKPDGTVKLLIYHTSRLHSGVPSRFSGSGSGTDYSLTISNLEQEDIATYFCQQGNTLPYTFGGGTKLEITGGGGSGGGGSGGGGSEVKLQESGPGLVAPSQSLSVTCTVSGVSLPDYGVSWIRQPPRKGLEWLGVIWGSETTYYNSALKSRLTIIKDNSKSQVFLKMNSLQTDDTAIYYCAKHYYYGGSYAMDYWGQGTSVTVSSTTTPAPRPPTPAPTIASQPLSLRPEACRPAAGGAVHTRGLDFACDIYIWAPLAGTCGVLLLSLVITLYCKRGRKKLLYIFKQPFMRPVQTTQEEDGCSCRFPEEEEGGCELRVKFSRSADAPAYKQGQNQLYNELNLGRREEYDVLDKRRGRDPEMGGKPRRKNPQEGLYNELQKDKMAEAYSEIGMKGERRRGKGHDGLYQGLSTATKDTYDALHMQALPPRSGEETRELQSLAAAVEPSAQTLKITDFSFSDFELSDLETALCTIRMFTDLNLVQNFLMKHEVLCRWILSVKKNYRKNVAYHNWRHAFNTAQCMFAALKAGIIQNKLTDLEILALLIAALSHDLDHRGVNNSYIQRSEHPLAQLYCHSITEHHHFDQCLMILNSPGNQILIGLSIEEYKTTLKIIKQAILATDLALYIKRRGEFFELIRKNQFNLEDPHQEELFLAMLMTACDLSAITKPWPIQQRIAEPVATEFFDQGDRERKELNIEPTDLMNREKKNKIPSMQVGFIDAICLQLYEALTHVSEDCFPLLDGCRKNRQKWQALTEQQ

SEQ ID NO: 8967 - protein, 823 aa, Artificial Sequence
  source: /note="Description of Artificial Sequence: Synthetic polypeptide"
MALPVTALLLPLALLLHAARPYPYDVPDYADIQMTQTTSSLSASLGDRVTISCRASQDISKYLNWYQQKPDGTVKLLIYHTSRLHSGVPSRFSGSGSGTDYSLTISNLEQEDIATYFCQQGNTLPYTFGGGTKLEITGGGGSGGGGSGGGGSEVKLQESGPGLVAPSQSLSVTCTVSGVSLPDYGVSWIRQPPRKGLEWLGVIWGSETTYYNSALKSRLTIIKDNSKSQVFLKMNSLQTDDTAIYYCAKHYYYGGSYAMDYWGQGTSVTVSSTTTPAPRPPTPAPTIASQPLSLRPEACRPAAGGAVHTRGLDFACDIYIWAPLAGTCGVLLLSLVITLYCKRGRKKLLYIFKQPFMRPVQTTQEEDGCSCRFPEEEEGGCELRVKFSRSADAPAYKQGQNQLYNELNLGRREEYDVLDKRRGRDPEMGGKPRRKNPQEGLYNELQKDKMAEAYSEIGMKGERRRGKGHDGLYQGLSTATKDTYDALHMQALPPRSGEETRELQSLAAAVVPSAQTLKITDFSFSDFELSDLETALCTIRMFTDLNLVQNFQMKHEVLCRWILSVKKNYRKNVAYHNWRHAFNTAQCMFAALKAGKIQNKLTDLEILALLIAALGHDLDHRGVNNSYIQRSEHPLAQLYCHSIMEHHHFDRCLMILNSPGNQILSGLSIEEYKTTLKIIKQAILATDLALYIKRRGEFFELIRKNQFNLEDPHQKELFLAMLMTACDLSAITKPWPIQQRIAELVATEFFDQGDRERKELNIEPTDLMNREKKNKIPSMQVGFIDAICLQLYEALTHVSEDCFPLLDGCRKNRQKWQALAEQQ

SEQ ID NO: 8968 - protein, 823 aa, Artificial Sequence
  source: /note="Description of Artificial Sequence: Synthetic polypeptide"
MALPVTALLLPLALLLHAARPYPYDVPDYADIQMTQTTSSLSASLGDRVTISCRASQDISKYLNWYQQKPDGTVKLLIYHTSRLHSGVPSRFSGSGSGTDYSLTISNLEQEDIATYFCQQGNTLPYTFGGGTKLEITGGGGSGGGGSGGGGSEVKLQESGPGLVAPSQSLSVTCTVSGVSLPDYGVSWIRQPPRKGLEWLGVIWGSETTYYNSALKSRLTIIKDNSKSQVFLKMNSLQTDDTAIYYCAKHYYYGGSYAMDYWGQGTSVTVSSTTTPAPRPPTPAPTIASQPLSLRPEACRPAAGGAVHTRGLDFACDIYIWAPLAGTCGVLLLSLVITLYCKRGRKKLLYIFKQPFMRPVQTTQEEDGCSCRFPEEEEGGCELRVKFSRSADAPAYKQGQNQLYNELNLGRREEYDVLDKRRGRDPEMGGKPRRKNPQEGLYNELQKDKMAEAYSEIGMKGERRRGKGHDGLYQGLSTATKDTYDALHMQALPPRSGEETRELQSLAAAVVPSAQTLKITDFSFSDFGLSDLETALCTIRMFTDLNLVQNFQMKHEVLCRWILSVKKNYRKNVAYHNWRHAFNTAQCMFAALKAGKIQNKLTDLEILALLIAALSHDLDHRGVNNSYIQRSEHPLAQLYCHSIMEHHHFDQCLMILNSPGNQILSGLSIEEYKTTLKIIKQAILATDLALYIKRRGEFFELIRKNQFNLEDPHQKELFLAMLMTACDLSAITKPWPIQQRIAELVATEFFDQGDRERKELNIEPTDLMNREKKNKIPSMQVGFIDAICLQLYEALTHVSEDCFPLLDGCRKNRQKWQALAEQQ

SEQ ID NO: 8969 - protein, 823 aa, Artificial Sequence
  source: /note="Description of Artificial Sequence: Synthetic polypeptide"
MALPVTALLLPLALLLHAARPYPYDVPDYADIQMTQTTSSLSASLGDRVTISCRASQDISKYLNWYQQKPDGTVKLLIYHTSRLHSGVPSRFSGSGSGTDYSLTISNLEQEDIATYFCQQGNTLPYTFGGGTKLEITGGGGSGGGGSGGGGSEVKLQESGPGLVAPSQSLSVTCTVSGVSLPDYGVSWIRQPPRKGLEWLGVIWGSETTYYNSALKSRLTIIKDNSKSQVFLKMNSLQTDDTAIYYCAKHYYYGGSYAMDYWGQGTSVTVSSTTTPAPRPPTPAPTIASQPLSLRPEACRPAAGGAVHTRGLDFACDIYIWAPLAGTCGVLLLSLVITLYCKRGRKKLLYIFKQPFMRPVQTTQEEDGCSCRFPEEEEGGCELRVKFSRSADAPAYKQGQNQLYNELNLGRREEYDVLDKRRGRDPEMGGKPRRKNPQEGLYNELQKDKMAEAYSEIGMKGERRRGKGHDGLYQGLSTATKDTYDALHMQALPPRSGEETRELQSLAAAVVPSAQTLKITDFSFSDFELSDLETALCTIRMFTDLNLVQNFQMKHEVLCRWILSVKKNYRKNVAYHNWRHAFNTAQCMFAALKAGKIQNKLTDLEILALLIAALSHDLDHRGVNNSYIQRSEHPLAQLYCHSIMEHHHFDQCLMILNSPGNQILSGLSIEEYKTTLKIIKQAILATDLALYIKRRGEFFELIRKNQFNLEDPHQKELFLAMLMTACDLSAITKPWPVQQRIAELVATEFFDQGDRERKELNIEPTDLMNREKKNKIPSMQVGFIDAICLQLYEALTHVSEDCFPLLDGCRKNRQKWQALAEQQ

SEQ ID NO: 8970 - protein, 823 aa, Artificial Sequence
  source: /note="Description of Artificial Sequence: Synthetic polypeptide"
MALPVTALLLPLALLLHAARPYPYDVPDYADIQMTQTTSSLSASLGDRVTISCRASQDISKYLNWYQQKPDGTVKLLIYHTSRLHSGVPSRFSGSGSGTDYSLTISNLEQEDIATYFCQQGNTLPYTFGGGTKLEITGGGGSGGGGSGGGGSEVKLQESGPGLVAPSQSLSVTCTVSGVSLPDYGVSWIRQPPRKGLEWLGVIWGSETTYYNSALKSRLTIIKDNSKSQVFLKMNSLQTDDTAIYYCAKHYYYGGSYAMDYWGQGTSVTVSSTTTPAPRPPTPAPTIASQPLSLRPEACRPAAGGAVHTRGLDFACDIYIWAPLAGTCGVLLLSLVITLYCKRGRKKLLYIFKQPFMRPVQTTQEEDGCSCRFPEEEEGGCELRVKFSRSADAPAYKQGQNQLYNELNLGRREEYDVLDKRRGRDPEMGGKPRRKNPQEGLYNELQKDKMAEAYSEIGMKGERRRGKGHDGLYQGLSTATKDTYDALHMQALPPRSGEETRELQSLAAAVVPSAQTLKITDFSFSDFELSDLETALCTIRMFTDLNLVQNFQMRHEVLCRWILSVKKNYRKNVAYHNWRHAFNTAQCMFAALKAGKIQNKLTDLEILALLIAALSHDLDHRGVNNSYIQRSEHPLAQLYCHSIMEHHHFDQCLMILNSPGNQILSGLSIEEYKTTLKIIKQAILATDLALYIKRRGEFFELIRKNQFNLEDPHQKELFLAMLMTACDLSAITKPWPIQQRIAELVATEFFDQGDRERKELNIEPTDLMNREKKNKIPSMQVGFIDAICLQLYEALTHVSEDCFPLLDGCRKNRQKWQALAEQQ

SEQ ID NO: 8971 - protein, 823 aa, Artificial Sequence
  source: /note="Description of Artificial Sequence: Synthetic polypeptide"
MALPVTALLLPLALLLHAARPYPYDVPDYADIQMTQTTSSLSASLGDRVTISCRASQDISKYLNWYQQKPDGTVKLLIYHTSRLHSGVPSRFSGSGSGTDYSLTISNLEQEDIATYFCQQGNTLPYTFGGGTKLEITGGGGSGGGGSGGGGSEVKLQESGPGLVAPSQSLSVTCTVSGVSLPDYGVSWIRQPPRKGLEWLGVIWGSETTYYNSALKSRLTIIKDNSKSQVFLKMNSLQTDDTAIYYCAKHYYYGGSYAMDYWGQGTSVTVSSTTTPAPRPPTPAPTIASQPLSLRPEACRPAAGGAVHTRGLDFACDIYIWAPLAGTCGVLLLSLVITLYCKRGRKKLLYIFKQPFMRPVQTTQEEDGCSCRFPEEEEGGCELRVKFSRSADAPAYKQGQNQLYNELNLGRREEYDVLDKRRGRDPEMGGKPRRKNPQEGLYNELQKDKMAEAYSEIGMKGERRRGKGHDGLYQGLSTATKDTYDALHMQALPPRSGEETRELQSLAAAVVPSAQTLKITDSSFSDFELSDLETALCTIRMFTDLNLVQNFQMKHEVLCRWILSVKKNYRKNVAYHNWRHAFNTAQCMFAALKAGKIQNKLTDLEILALLIAALSHDLDHRGVNNSYIQRSEHPLAQLYCHSIMEHHHFDQCLMILNSPGNQILSGLSIEECKTTLKIIKQAILATDLALYIKRRGEFFELIRKNQFNLEDPHQKELFLAMLTTACDLSAITKPWPIQQRIAELVATEFFDQGDRERKELNIEPTDLMNREKKNKIPSMQVGFIDAICLQLYEALTHVSEDCFPLLDGCRKNRQKWQALAEQQ

SEQ ID NO: 8972 - protein, 823 aa, Artificial Sequence
  source: /note="Description of Artificial Sequence: Synthetic polypeptide"
MALPVTALLLPLALLLHAARPYPYDVPDYADIQMTQTTSSLSASLGDRVTISCRASQDISKYLNWYQQKPDGTVKLLIYHTSRLHSGVPSRFSGSGSGTDYSLTISNLEQEDIATYFCQQGNTLPYTFGGGTKLEITGGGGSGGGGSGGGGSEVKLQESGPGLVAPSQSLSVTCTVSGVSLPDYGVSWIRQPPRKGLEWLGVIWGSETTYYNSALKSRLTIIKDNSKSQVFLKMNSLQTDDTAIYYCAKHYYYGGSYAMDYWGQGTSVTVSSTTTPAPRPPTPAPTIASQPLSLRPEACRPAAGGAVHTRGLDFACDIYIWAPLAGTCGVLLLSLVITLYCKRGRKKLLYIFKQPFMRPVQTTQEEDGCSCRFPEEEEGGCELRVKFSRSADAPAYKQGQNQLYNELNLGRREEYDVLDKRRGRDPEMGGKPRRKNPQEGLYNELQKDKMAEAYSEIGMKGERRRGKGHDGLYQGLSTATKDTYDALHMQALPPRSGEETRELQSLAAAVVPSAQTLKITDFSFSDFELSDLETALCTIRMFTDLNLVQNFQMKHEVLCRWILSVKKNYRKNVAYHNWRHAFNTAQCMFAALKAGKIQNKLTDLEILALLIVTLSHDLDHRGVNNSYIQRSEHPLAQLYCHSIMEHHHFDQCLMILNSPGNQILSGLSIEEYKTTLKIIKQAILATDLALYIERRGEFFELIRKNQFNLEDPHQKELFLAMLMTACDLSAITKPWPIQQRIAELVATEFFDQGDRERKELNIEPTDLMNREKKNKIPSMQVGFIDAICLQLYKALTHVSEDCFPLLDGCRKNRQKWQALAEQQ

SEQ ID NO: 8973 - protein, 823 aa, Artificial Sequence
  source: /note="Description of Artificial Sequence: Synthetic polypeptide"
MALPVTALLLPLALLLHAARPYPYDVPDYADIQMTQTTSSLSASLGDRVTISCRASQDISKYLNWYQQKPDGTVKLLIYHTSRLHSGVPSRFSGSGSGTDYSLTISNLEQEDIATYFCQQGNTLPYTFGGGTKLEITGGGGSGGGGSGGGGSEVKLQESGPGLVAPSQSLSVTCTVSGVSLPDYGVSWIRQPPRKGLEWLGVIWGSETTYYNSALKSRLTIIKDNSKSQVFLKMNSLQTDDTAIYYCAKHYYYGGSYAMDYWGQGTSVTVSSTTTPAPRPPTPAPTIASQPLSLRPEACRPAAGGAVHTRGLDFACDIYIWAPLAGTCGVLLLSLVITLYCKRGRKKLLYIFKQPFMRPVQTTQEEDGCSCRFPEEEEGGCELRVKFSRSADAPAYKQGQNQLYNELNLGRREEYDVLDKRRGRDPEMGGKPRRKNPQEGLYNELQKDKMAEAYSEIGMKGERRRGKGHDGLYQGLSTATKDTYDALHMQALPPRSGEETRELQSLAAAVVPSAQTLKITDFSFSDFELSDLETALCTIRMFTDLNLVQNFQMKHEVLCRWILSVKKNYRKNVAYHNWRHAFNTAQCMFAALKAGKIQNKLTDLEILALLIAALSHDLDHRGVNNSYIQRSEHPLAQLYCHSIMEHHHFDQCLMILNSPGNQILSGLSIEEYKTTLKIIKQAILATDLALCIKRRGEFFELIRKNQFNLEDPHQKELFLAMLMTACDLSAITKPWPIQQRIAELVATEFFDQGDRERKELNIEPTDLMNREKKNKIPSMRVGFIDAICLQLYEALTHVSEDCFPLLDGCRKNRQKWQALAEQQ

SEQ ID NO: 8974 - protein, 823 aa, Artificial Sequence
  source: /note="Description of Artificial Sequence: Synthetic polypeptide"
MALPVTALLLPLALLLHAARPYPYDVPDYADIQMTQTTSSLSASLGDRVTISCRASQDISKYLNWYQQKPDGTVKLLIYHTSRLHSGVPSRFSGSGSGTDYSLTISNLEQEDIATYFCQQGNTLPYTFGGGTKLEITGGGGSGGGGSGGGGSEVKLQESGPGLVAPSQSLSVTCTVSGVSLPDYGVSWIRQPPRKGLEWLGVIWGSETTYYNSALKSRLTIIKDNSKSQVFLKMNSLQTDDTAIYYCAKHYYYGGSYAMDYWGQGTSVTVSSTTTPAPRPPTPAPTIASQPLSLRPEACRPAAGGAVHTRGLDFACDIYIWAPLAGTCGVLLLSLVITLYCKRGRKKLLYIFKQPFMRPVQTTQEEDGCSCRFPEEEEGGCELRVKFSRSADAPAYKQGQNQLYNELNLGRREEYDVLDKRRGRDPEMGGKPRRKNPQEGLYNELQKDKMAEAYSEIGMKGERRRGKGHDGLYQGLSTATKDTYDALHMQALPPRSGEETRELQSLAAAVVPSAQTLKITDFSFSDFELSDLETALCTIRMFTDLNLVQNFQMKHEVPCRWILSVKKNYRKNVAYHNWRHAFNTAQCMFAALKAGKIQNKLTDLEILALLIAALSHDLDHRGVNNSYIQRSEHPLAQLYCHSIMEHHHFDQCLMILNSPGNQILSGLSIEEYKTTLKIIKQAILATDLALYIKRRGEFFELIRRNQFNLEDPHQKELFLAMLMTACDLSAITKPWPIQQRIAELVATEFFDQGDRERKELNIEPTDLMNREKKNKIPSMQVGFIDAICLQLYEALTHVSEDCFPLLDGCRKNRQKWQALAEQQ

SEQ ID NO: 8975 - protein, 823 aa, Artificial Sequence
  source: /note="Description of Artificial Sequence: Synthetic polypeptide"
MALPVTALLLPLALLLHAARPYPYDVPDYADIQMTQTTSSLSASLGDRVTISCRASQDISKYLNWYQQKPDGTVKLLIYHTSRLHSGVPSRFSGSGSGTDYSLTISNLEQEDIATYFCQQGNTLPYTFGGGTKLEITGGGGSGGGGSGGGGSEVKLQESGPGLVAPSQSLSVTCTVSGVSLPDYGVSWIRQPPRKGLEWLGVIWGSETTYYNSALKSRLTIIKDNSKSQVFLKMNSLQTDDTAIYYCAKHYYYGGSYAMDYWGQGTSVTVSSTTTPAPRPPTPAPTIASQPLSLRPEACRPAAGGAVHTRGLDFACDIYIWAPLAGTCGVLLLSLVITLYCKRGRKKLLYIFKQPFMRPVQTTQEEDGCSCRFPEEEEGGCELRVKFSRSADAPAYKQGQNQLYNELNLGRREEYDVLDKRRGRDPEMGGKPRRKNPQEGLYNELQKDKMAEAYSEIGMKGERRRGKGHDGLYQGLSTATKDTYDALHMQALPPRSGEETRELQSLAAAVVPSAQTLKITDFSFSDFELSDLETALCTIWMFTDLNLVQNFQMKHEVLCRWILSVKKNYRKNVAYHNRRHAFNTAQCMFAALKAGKIQNKLTDLEILALLIAALSHDLDHRGVNNSYIQRSEHPLAQLYCHSIMEHHHFDQCLMILNSPGNQILSGLSIEEYKTTLKIIKQAILATDLALYIKRRGEFFELIRKNQFNLEDPHQKELFLAMLMTACDLSAITKPWPIQQRIAELVATEFFDQGDRERKELNIEPTDLTNREKKNKIPSMQVGFVDAICLQLYEALTHVSEDCFPLLDGCRKNRQKWQALAEQQ

SEQ ID NO: 8976 - DNA, 1467 bp, Artificial Sequence
  source: /note="Description of Artificial Sequence: Synthetic polynucleotide"
atggccttaccagtgaccgccttgctcctgccgctggccttgctgctccacgccgccaggccggacatccagatgacacagactacatcctccctgtctgcctctctgggagacagagtcaccatcagttgcagggcaagtcaggacattagtaaatatttaaattggtatcagcagaaaccagatggaactgttaaactcctgatctaccatacatcaagattacactcaggagtcccatcaaggttcagtggcagtgggtctggaacagattattctctcaccattagcaacctggagcaagaagatattgccacttacttttgccaacagggtaatacgcttccgtacacgttcggaggggggaccaagctggagatcacaggtggcggtggctcgggcggtggtgggtcgggtggcggcggatctgaggtgaaactgcaggagtcaggacctggcctggtggcgccctcacagagcctgtccgtcacatgcactgtctcaggggtctcattacccgactatggtgtaagctggattcgccagcctccacgaaagggtctggagtggctgggagtaatatggggtagtgaaaccacatactataattcagctctcaaatccagactgaccatcatcaaggacaactccaagagccaagttttcttaaaaatgaacagtctgcaaactgatgacacagccatttactactgtgccaaacattattactacggtggtagctatgctatggactactggggccaaggaacctcagtcaccgtctcctcaaccacgacgccagcgccgcgaccaccaacaccggcgcccaccatcgcgtcgcagcccctgtccctgcgcccagaggcgtgccggccagcggcggggggcgcagtgcacacgagggggctggacttcgcctgtgatatctacatctgggcgcccttggccgggacttgtggggtccttctcctgtcactggttatcaccctttactgcaaacggggcagaaagaaactcctgtatatattcaaacaaccatttatgagaccagtacaaactactcaagaggaagatggctgtagctgccgatttccagaagaagaagaaggaggatgtgaactgagagtgaagttcagcaggagcgcagacgcccccgcgtacaagcagggccagaaccagctctataacgagctcaatctaggacgaagagaggagtacgatgttttggacaagagacgtggccgggaccctgagatggggggaaagccgagaaggaagaaccctcaggaaggcctgtacaatgaactgcagaaagataagatggcggaggcctacagtgagattgggatgaaaggcgagcgccggaggggcaaggggcacgatggcctttaccagggtctcagtacagccaccaaggacacctacgacgcccttcacatgcaggccctgccccctcgcggatcctga

SEQ ID NO: 8977 - DNA, 2445 bp, Artificial Sequence; identical to SEQ ID NO: 8297
  source: /note="Description of Artificial Sequence: Synthetic polynucleotide"

SEQ ID NO: 8978 - DNA, 2472 bp, Artificial Sequence
  source: /note="Description of Artificial Sequence: Synthetic polynucleotide"
atggccttaccagtgaccgccttgctcctgccgctggccttgctgctccacgccgccaggccgtacccatacgatgttccagattacgctgacatccagatgacacagactacatcctccctgtctgcctctctgggagacagagtcaccatcagttgcagggcaagtcaggacattagtaaatatttaaattggtatcagcagaaaccagatggaactgttaaactcctgatctaccatacatcaagattacactcaggagtcccatcaaggttcagtggcagtgggtctggaacagattattctctcaccattagcaacctggagcaagaagatattgccacttacttttgccaacagggtaatacgcttccgtacacgttcggaggggggaccaagctggagatcacaggtggcggtggctcgggcggtggtgggtcgggtggcggcggatctgaggtgaaactgcaggagtcaggacctggcctggtggcgccctcacagagcctgtccgtcacatgcactgtctcaggggtctcattacccgactatggtgtaagctggattcgccagcctccacgaaagggtctggagtggctgggagtaatatggggtagtgaaaccacatactataattcagctctcaaatccagactgaccatcatcaaggacaactccaagagccaagttttcttaaaaatgaacagtctgcaaactgatgacacagccatttactactgtgccaaacattattactacggtggtagctatgctatggactactggggccaaggaacctcagtcaccgtctcctcaaccacgacgccagcgccgcgaccaccaacaccggcgcccaccatcgcgtcgcagcccctgtccctgcgcccagaggcgtgccggccagcggcggggggcgcagtgcacacgagggggctggacttcgcctgtgatatctacatctgggcgcccttggccgggacttgtggggtccttctcctgtcactggttatcaccctttactgcaaacggggcagaaagaaactcctgtatatattcaaacaaccatttatgagaccagtacaaactactcaagaggaagatggctgtagctgccgatttccagaagaagaagaaggaggatgtgaactgagagtgaagttcagcaggagcgcagacgcccccgcgtacaagcagggccagaaccagctctataacgagctcaatctaggacgaagagaggagtacgatgttttggacaagagacgtggccgggaccctgagatggggggaaagccgagaaggaagaaccctcaggaaggcctgtacaatgaactgcagaaagataagatggcggaggcctacagtgagattgggatgaaaggcgagcgccggaggggcaaggggcacgatggcctttaccagggtctcagtacagccaccaaggacacctacgacgcccttcacatgcaggccctgccccctcgcggatccgaagaaacaagagagctacagtcgttagcggctgctgtggtgccatctgcccagacccttaaaattactgactttagcttcagtgactttgagctgtctgatctggaaacagcactgtgtacaattcggatgtttactgacctcaaccttgtgcagaacttccagatgaaacatgaggttctttgcagatggattttaagtgttaagaagaattatcggaagaatgttgcctatcataattggagacatgcctttaatacagctcagtgcatgtttgctgctctaaaagcaggcaaaattcagaacaagctgactgacctggagatacttgcattgctgattgctgcactaagccacgatttggatcaccgtggtgtgaataactcttacatacagcgaagtgaacatccacttgcccagctttactgccattcaatcatggaacaccatcattttgaccagtgcctgatgattcttaatagtccaggcaatcagattctcagtggcctctccattgaagaatataagaccacgttgaaaataatcaagcaagctattttagctacagacctagcactgtacattaagaggctaggagaatttgctgaacttataagaaaaaatcaattcaatttggaagatcctcatcaaaaggagttgtttttggcaatgctgatgacagcttgtgatctttctgcaattacaaaaccctggcctattcaacaacggatagcagaacttgtagcaactgaattttttgatcaaggagacagagagagaaaagaactcaacatagaacccactgatctaatgaacagggagaagaaaaacaaaatcccaagtatgcaagttgggttcatagatgccatctgcttgcaactgtatgaggccctgacccacgtgtcagaggactgtttccctttgctagatggctgcagaaagaacaggcagaaatggcaggcccttgcagaacagcagtaa

SEQ ID NO: 8979 - DNA, 2472 bp, Artificial Sequence
  source: /note="Description of Artificial Sequence: Synthetic polynucleotide"
atggccttaccagtgaccgccttgctcctgccgctggccttgctgctccacgccgccaggccgtacccatacgatgttccagattacgctgacatccagatgacacagactacatcctccctgtctgcctctctgggagacagagtcaccatcagttgcagggcaagtcaggacattagtaaatatttaaattggtatcagcagaaaccagatggaactgttaaactcctgatctaccatacatcaagattacactcaggagtcccatcaaggttcagtggcagtgggtctggaacagattattctctcaccattagcaacctggagcaagaagatattgccacttacttttgccaacagggtaatacgcttccgtacacgttcggaggggggaccaagctggagatcacaggtggcggtggctcgggcggtggtgggtcgggtggcggcggatctgaggtgaaactgcaggagtcaggacctggcctggtggcgccctcacagagcctgtccgtcacatgcactgtctcaggggtctcattacccgactatggtgtaagctggattcgccagcctccacgaaagggtctggagtggctgggagtaatatggggtagtgaaaccacatactataattcagctctcaaatccagactgaccatcatcaaggacaactccaagagccaagttttcttaaaaatgaacagtctgcaaactgatgacacagccatttactactgtgccaaacattattactacggtggtagctatgctatggactactggggccaaggaacctcagtcaccgtctcctcaaccacgacgccagcgccgcgaccaccaacaccggcgcccaccatcgcgtcgcagcccctgtccctgcgcccagaggcgtgccggccagcggcggggggcgcagtgcacacgagggggctggacttcgcctgtgatatctacatctgggcgcccttggccgggacttgtggggtccttctcctgtcactggttatcaccctttactgcaaacggggcagaaagaaactcctgtatatattcaaacaaccatttatgagaccagtacaaactactcaagaggaagatggctgtagctgccgatttccagaagaagaagaaggaggatgtgaactgagagtgaagttcagcaggagcgcagacgcccccgcgtacaagcagggccagaaccagctctataacgagctcaatctaggacgaagagaggagtacgatgttttggacaagagacgtggccgggaccctgagatggggggaaagccgagaaggaagaaccctcaggaaggcctgtacaatgaactgcagaaagataagatggcggaggcctacagtgagattgggatgaaaggcgagcgccggaggggcaaggggcacgatggcctttaccagggtctcagtacagccaccaaggacacctacgacgcccttcacatgcaggccctgccccctcgcggatccgaagaaacaagagagctacagtcgttagcggctgctgtggtgccatctgcccagacccttaaaattactgactttagcttcagtgactttgagctgtctgatctggaaacagcactgtgtacaattcggatgtttactgacctcaaccttgtgcagaacttccagatgaaacatgaggttctttgcagatggattttaagtgttaagaagaattatcggaagaatgttgcctatcataattggagacatgcctttaatacagctcagtgcatgtttgctgctctaaaagcaggcaaaattcagaacaagctgactgacctggagatacttgcattgctgattgctgcactaagcgccgatttggatcaccgtggtgtgaataactcttacatacagcgaagtgaacatccacttgcccagctttactgccattcaatcatggaacaccatcattttgaccagtgcctgatgattcttaatagtccaggcaatcagattctcagtggcctctccattgaagaatataagaccacgttgaaaataatcaagcaagctattttagctacagacctagcactgtacattaagaggctaggagaattttttgaacttataagaaaaaatcaattcaatttggaagatcctcatcaaaaggagttgtttttggcaatgctgatgacagcttgtgatctttctgcaattacaaaaccctggcctattcaacaacggatagcagaacttgtagcaactgaattttttgatcaaggagacagagagagaaaagaactcaacatagaacccactgatctaatgaacagggagaagaaaaacaaaatcccaagtatgcaagttgggttcatagatgccatctgcttgcaactgtatgaggccctgacccacgtgtcagaggactgtttccctttgctagatggctgcagaaagaacaggcagaaatggcaggcccttgcagaacagcagtga

SEQ ID NO: 8980 - DNA, 1494 bp, Artificial Sequence
  source: /note="Description of Artificial Sequence: Synthetic polynucleotide"
atggccttaccagtgaccgccttgctcctgccgctggccttgctgctccacgccgccaggccgtacccatacgatgttccagattacgctgacatccagatgacacagactacatcctccctgtctgcctctctgggagacagagtcaccatcagttgcagggcaagtcaggacattagtaaatatttaaattggtatcagcagaaaccagatggaactgttaaactcctgatctaccatacatcaagattacactcaggagtcccatcaaggttcagtggcagtgggtctggaacagattattctctcaccattagcaacctggagcaagaagatattgccacttacttttgccaacagggtaatacgcttccgtacacgttcggaggggggaccaagctggagatcacaggtggcggtggctcgggcggtggtgggtcgggtggcggcggatctgaggtgaaactgcaggagtcaggacctggcctggtggcgccctcacagagcctgtccgtcacatgcactgtctcaggggtctcattacccgactatggtgtaagctggattcgccagcctccacgaaagggtctggagtggctgggagtaatatggggtagtgaaaccacatactataattcagctctcaaatccagactgaccatcatcaaggacaactccaagagccaagttttcttaaaaatgaacagtctgcaaactgatgacacagccatttactactgtgccaaacattattactacggtggtagctatgctatggactactggggccaaggaacctcagtcaccgtctcctcaaccacgacgccagcgccgcgaccaccaacaccggcgcccaccatcgcgtcgcagcccctgtccctgcgcccagaggcgtgccggccagcggcggggggcgcagtgcacacgagggggctggacttcgcctgtgatatctacatctgggcgcccttggccgggacttgtggggtccttctcctgtcactggttatcaccctttactgcaaacggggcagaaagaaactcctgtatatattcaaacaaccatttatgagaccagtacaaactactcaagaggaagatggctgtagctgccgatttccagaagaagaagaaggaggatgtgaactgagagtgaagttcagcaggagcgcagacgcccccgcgtacaagcagggccagaaccagctctataacgagctcaatctaggacgaagagaggagtacgatgttttggacaagagacgtggccgggaccctgagatggggggaaagccgagaaggaagaaccctcaggaaggcctgtacaatgaactgcagaaagataagatggcggaggcctacagtgagattgggatgaaaggcgagcgccggaggggcaaggggcacgatggcctttaccagggtctcagtacagccaccaaggacacctacgacgcccttcacatgcaggccctgccccctcgcggatcctaa

SEQ ID NO: 8981 - DNA, 2190 bp, Artificial Sequence
  source: /note="Description of Artificial Sequence: Synthetic polynucleotide"
atggccttaccagtgaccgccttgctcctgccgctggccttgctgctccacgccgccaggccggacatccagatgacacagactacatcctccctgtctgcctctctgggagacagagtcaccatcagttgcagggcaagtcaggacattagtaaatatttaaattggtatcagcagaaaccagatggaactgttaaactcctgatctaccatacatcaagattacactcaggagtcccatcaaggttcagtggcagtgggtctggaacagattattctctcaccattagcaacctggagcaagaagatattgccacttacttttgccaacagggtaatacgcttccgtacacgttcggaggggggaccaagctggagatcacaggtggcggtggctcgggcggtggtgggtcgggtggcggcggatctgaggtgaaactgcaggagtcaggacctggcctggtggcgccctcacagagcctgtccgtcacatgcactgtctcaggggtctcattacccgactatggtgtaagctggattcgccagcctccacgaaagggtctggagtggctgggagtaatatggggtagtgaaaccacatactataattcagctctcaaatccagactgaccatcatcaaggacaactccaagagccaagttttcttaaaaatgaacagtctgcaaactgatgacacagccatttactactgtgccaaacattattactacggtggtagctatgctatggactactggggccaaggaacctcagtcaccgtctcctcaaccacgacgccagcgccgcgaccaccaacaccggcgcccaccatcgcgtcgcagcccctgtccctgcgcccagaggcgtgccggccagcggcggggggcgcagtgcacacgagggggctggacttcgcctgtgatatctacatctgggcgcccttggccgggacttgtggggtccttctcctgtcactggttatcaccctttactgcaaacggggcagaaagaaactcctgtatatattcaaacaaccatttatgagaccagtacaaactactcaagaggaagatggctgtagctgccgatttccagaagaagaagaaggaggatgtgaactgagagtgaagttcagcaggagcgcagacgcccccgcgtacaagcagggccagaaccagctctataacgagctcaatctaggacgaagagaggagtacgatgttttggacaagagacgtggccgggaccctgagatggggggaaagccgagaaggaagaaccctcaggaaggcctgtacaatgaactgcagaaagataagatggcggaggcctacagtgagattgggatgaaaggcgagcgccggaggggcaaggggcacgatggcctttaccagggtctcagtacagccaccaaggacacctacgacgcccttcacatgcaggccctgccccctcgcggatctatggtgagcaagggcgaggagctgttcaccggggtggtgcccatcctggtcgagctggacggcgacgtaaacggccacaagttcagcgtgtccggcgagggcgagggcgatgccacctacggcaagctgaccctgaagttcatctgcaccaccggcaagctgcccgtgccctggcccaccctcgtgaccaccctgacctacggcgtgcagtgcttcagccgctaccccgaccacatgaagcagcacgacttcttcaagtccgccatgcccgaaggctacgtccaggagcgcaccatcttcttcaaggacgacggcaactacaagacccgcgccgaggtgaagttcgagggcgacaccctggtgaaccgcatcgagctgaagggcatcgacttcaaggaggacggcaacatcctggggcacaagctggagtacaactacaacagccacaacgtctatatcatggccgacaagcagaagaacggcatcaaggtgaacttcaagatccgccacaacatcgaggacggcagcgtgcagctcgccgaccactaccagcagaacacccccatcggcgacggccccgtgctgctgcccgacaaccactacctgagcacccagtccaagctgagcaaagaccccaacgagaagcgcgatcacatggtcctgctggagttcgtgaccgccgccgggatcactctcggcatggacgagctgtacaagggatcctaa

SEQ ID NO: 8982 - DNA, 3168 bp, Artificial Sequence
  source: /note="Description of Artificial Sequence: Synthetic polynucleotide"
atggccttaccagtgaccgccttgctcctgccgctggccttgctgctccacgccgccaggccggacatccagatgacacagactacatcctccctgtctgcctctctgggagacagagtcaccatcagttgcagggcaagtcaggacattagtaaatatttaaattggtatcagcagaaaccagatggaactgttaaactcctgatctaccatacatcaagattacactcaggagtcccatcaaggttcagtggcagtgggtctggaacagattattctctcaccattagcaacctggagcaagaagatattgccacttacttttgccaacagggtaatacgcttccgtacacgttcggaggggggaccaagctggagatcacaggtggcggtggctcgggcggtggtgggtcgggtggcggcggatctgaggtgaaactgcaggagtcaggacctggcctggtggcgccctcacagagcctgtccgtcacatgcactgtctcaggggtctcattacccgactatggtgtaagctggattcgccagcctccacgaaagggtctggagtggctgggagtaatatggggtagtgaaaccacatactataattcagctctcaaatccagactgaccatcatcaaggacaactccaagagccaagttttcttaaaaatgaacagtctgcaaactgatgacacagccatttactactgtgccaaacattattactacggtggtagctatgctatggactactggggccaaggaacctcagtcaccgtctcctcaaccacgacgccagcgccgcgaccaccaacaccggcgcccaccatcgcgtcgcagcccctgtccctgcgcccagaggcgtgccggccagcggcggggggcgcagtgcacacgagggggctggacttcgcctgtgatatctacatctgggcgcccttggccgggacttgtggggtccttctcctgtcactggttatcaccctttactgcaaacggggcagaaagaaactcctgtatatattcaaacaaccatttatgagaccagtacaaactactcaagaggaagatggctgtagctgccgatttccagaagaagaagaaggaggatgtgaactgagagtgaagttcagcaggagcgcagacgcccccgcgtacaagcagggccagaaccagctctataacgagctcaatctaggacgaagagaggagtacgatgttttggacaagagacgtggccgggaccctgagatggggggaaagccgagaaggaagaaccctcaggaaggcctgtacaatgaactgcagaaagataagatggcggaggcctacagtgagattgggatgaaaggcgagcgccggaggggcaaggggcacgatggcctttaccagggtctcagtacagccaccaaggacacctacgacgcccttcacatgcaggccctgccccctcgcggatctatggtgagcaagggcgaggagctgttcaccggggtggtgcccatcctggtcgagctggacggcgacgtaaacggccacaagttcagcgtgtccggcgagggcgagggcgatgccacctacggcaagctgaccctgaagttcatctgcaccaccggcaagctgcccgtgccctggcccaccctcgtgaccaccctgacctacggcgtgcagtgcttcagccgctaccccgaccacatgaagcagcacgacttcttcaagtccgccatgcccgaaggctacgtccaggagcgcaccatcttcttcaaggacgacggcaactacaagacccgcgccgaggtgaagttcgagggcgacaccctggtgaaccgcatcgagctgaagggcatcgacttcaaggaggacggcaacatcctggggcacaagctggagtacaactacaacagccacaacgtctatatcatggccgacaagcagaagaacggcatcaaggtgaacttcaagatccgccacaacatcgaggacggcagcgtgcagctcgccgaccactaccagcagaacacccccatcggcgacggccccgtgctgctgcccgacaaccactacctgagcacccagtccaagctgagcaaagaccccaacgagaagcgcgatcacatggtcctgctggagttcgtgaccgccgccgggatcactctcggcatggacgagctgtacaagggatccgaagaaacaagagagctacagtcgttagcggctgctgtggtgccatctgcccagacccttaaaattactgactttagcttcagtgactttgagctgtctgatctggaaacagcactgtgtacaattcggatgtttactgacctcaaccttgtgcagaacttccagatgaaacatgaggttctttgcagatggattttaagtgttaagaagaattatcggaagaatgttgcctatcataattggagacatgcctttaatacagctcagtgcatgtttgctgctctaaaagcaggcaaaattcagaacaagctgactgacctggagatacttgcattgctgattgctgcactaagcgccgatttggatcaccgtggtgtgaataactcttacatacagcgaagtgaacatccacttgcccagctttactgccattcaatcatggaacaccatcattttgaccagtgcctgatgattcttaatagtccaggcaatcagattctcagtggcctctccattgaagaatataagaccacgttgaaaataatcaagcaagctattttagctacagacctagcactgtacattaagaggctaggagaattttttgaacttataagaaaaaatcaattcaatttggaagatcctcatcaaaaggagttgtttttggcaatgctgatgacagcttgtgatctttctgcaattacaaaaccctggcctattcaacaacggatagcagaacttgtagcaactgaattttttgatcaaggagacagagagagaaaagaactcaacatagaacccactgatctaatgaacagggagaagaaaaacaaaatcccaagtatgcaagttgggttcatagatgccatctgcttgcaactgtatgaggccctgacccacgtgtcagaggactgtttccctttgctagatggctgcagaaagaacaggcagaaatggcaggcccttgcagaacagcagtga

SEQ ID NO: 8983 - DNA, 4161 bp, Artificial Sequence
  source: /note="Description of Artificial Sequence: Synthetic polynucleotide"
atggccttaccagtgaccgccttgctcctgccgctggccttgctgctccacgccgccaggccggacatccagatgacacagactacatcctccctgtctgcctctctgggagacagagtcaccatcagttgcagggcaagtcaggacattagtaaatatttaaattggtatcagcagaaaccagatggaactgttaaactcctgatctaccatacatcaagattacactcaggagtcccatcaaggttcagtggcagtgggtctggaacagattattctctcaccattagcaacctggagcaagaagatattgccacttacttttgccaacagggtaatacgcttccgtacacgttcggaggggggaccaagctggagatcacaggtggcggtggctcgggcggtggtgggtcgggtggcggcggatctgaggtgaaactgcaggagtcaggacctggcctggtggcgccctcacagagcctgtccgtcacatgcactgtctcaggggtctcattacccgactatggtgtaagctggattcgccagcctccacgaaagggtctggagtggctgggagtaatatggggtagtgaaaccacatactataattcagctctcaaatccagactgaccatcatcaaggacaactccaagagccaagttttcttaaaaatgaacagtctgcaaactgatgacacagccatttactactgtgccaaacattattactacggtggtagctatgctatggactactggggccaaggaacctcagtcaccgtctcctcaaccacgacgccagcgccgcgaccaccaacaccggcgcccaccatcgcgtcgcagcccctgtccctgcgcccagaggcgtgccggccagcggcggggggcgcagtgcacacgagggggctggacttcgcctgtgatatctacatctgggcgcccttggccgggacttgtggggtccttctcctgtcactggttatcaccctttactgcaaacggggcagaaagaaactcctgtatatattcaaacaaccatttatgagaccagtacaaactactcaagaggaagatggctgtagctgccgatttccagaagaagaagaaggaggatgtgaactgagagtgaagttcagcaggagcgcagacgcccccgcgtacaagcagggccagaaccagctctataacgagctcaatctaggacgaagagaggagtacgatgttttggacaagagacgtggccgggaccctgagatggggggaaagccgagaaggaagaaccctcaggaaggcctgtacaatgaactgcagaaagataagatggcggaggcctacagtgagattgggatgaaaggcgagcgccggaggggcaaggggcacgatggcctttaccagggtctcagtacagccaccaaggacacctacgacgcccttcacatgcaggccctgccccctcgcggatccgaagaaacaagagagctacagtcgttagcggctgctgtggtgccatctgcccagacccttaaaattactgactttagcttcagtgactttgagctgtctgatctggaaacagcactgtgtacaattcggatgtttactgacctcaaccttgtgcagaacttccagatgaaacatgaggttctttgcagatggattttaagtgttaagaagaattatcggaagaatgttgcctatcataattggagacatgcctttaatacagctcagtgcatgtttgctgctctaaaagcaggcaaaattcagaacaagctgactgacctggagatacttgcattgctgattgctgcactaagcgccgatttggatcaccgtggtgtgaataactcttacatacagcgaagtgaacatccacttgcccagctttactgccattcaatcatggaacaccatcattttgaccagtgcctgatgattcttaatagtccaggcaatcagattctcagtggcctctccattgaagaatataagaccacgttgaaaataatcaagcaagctattttagctacagacctagcactgtacattaagaggctaggagaattttttgaacttataagaaaaaatcaattcaatttggaagatcctcatcaaaaggagttgtttttggcaatgctgatgacagcttgtgatctttctgcaattacaaaaccctggcctattcaacaacggatagcagaacttgtagcaactgaattttttgatcaaggagacagagagagaaaagaactcaacatagaacccactgatctaatgaacagggagaagaaaaacaaaatcccaagtatgcaagttgggttcatagatgccatctgcttgcaactgtatgaggccctgacccacgtgtcagaggactgtttccctttgctagatggctgcagaaagaacaggcagaaatggcaggcccttgcagaacagcagggatccggagctactaacttcagcctgctgaagcaggctggagacgtggaggagaaccctggacctatggaagatgccaaaaacattaagaagggcccagcgccattctacccactcgaagacgggaccgccggcgagcagctgcacaaagccatgaagcgctacgccctggtgcccggcaccatcgcctttaccgacgcacatatcgaggtggacattacctacgccgagtacttcgagatgagcgttcggctggcagaagctatgaagcgctatgggctgaatacaaaccatcggatcgtggtgtgcagcgagaatagcttgcagttcttcatgcccgtgttgggtgccctgttcatcggtgtggctgtggccccagctaacgacatctacaacgagcgcgagctgctgaacagcatgggcatcagccagcccaccgtcgtattcgtgagcaagaaagggctgcaaaagatcctcaacgtgcaaaagaagctaccgatcatacaaaagatcatcatcatggatagcaagaccgactaccagggcttccaaagcatgtacaccttcgtgacttcccatttgccacccggcttcaacgagtacgacttcgtgcccgagagcttcgaccgggacaaaaccatcgccctgatcatgaacagtagtggcagtaccggattgcccaagggcgtagccctaccgcaccgcaccgcttgtgtccgattcagtcatgcccgcgaccccatcttcggcaaccagatcatccccgacaccgctatcctcagcgtggtgccatttcaccacggcttcggcatgttcaccacgctgggctacttgatctgcggctttcgggtcgtgctcatgtaccgcttcgaggaggagctattcttgcgcagcttgcaagactataagattcaatctgccctgctggtgcccacactatttagcttcttcgctaagagcactctcatcgacaagtacgacctaagcaacttgcacgagatcgccagcggcggggcgccgctcagcaaggaggtaggtgaggccgtggccaaacgcttccacctaccaggcatccgccagggctacggcctgacagaaacaaccagcgccattctgatcacccccgaaggggacgacaagcctggcgcagtaggcaaggtggtgcccttcttcgaggctaaggtggtggacttggacaccggtaagacactgggtgtgaaccagcgcggcgagctgtgcgtccgtggccccatgatcatgagcggctacgttaacaaccccgaggctacaaacgctctcatcgacaaggacggctggctgcacagcggcgacatcgcctactgggacgaggacgagcacttcttcatcgtggaccggctgaagagcctgatcaaatacaagggctaccaggtagccccagccgaactggagagcatcctgctgcaacaccccaacatcttcgacgccggggtcgccggcctgcccgacgacgatgccggcgagctgcccgccgcagtcgtcgtgctggaacacggtaaaaccatgaccgagaaggagatcgtggactatgtggccagccaggttacaaccgccaagaagctgcgcggtggtgttgtgttcgtggacgaggtgcctaaaggactgaccggcaagttggacgcccgcaagatccgcgagattctcattaaggccaagaagggcggcaagatcgccgtgtga

SEQ ID NO: 8984 - DNA, 4161 bp, Artificial Sequence
  source: /note="Description of Artificial Sequence: Synthetic polynucleotide"
atggccttaccagtgaccgccttgctcctgccgctggccttgctgctccacgccgccaggccggacatccagatgacacagactacatcctccctgtctgcctctctgggagacagagtcaccatcagttgcagggcaagtcaggacattagtaaatatttaaattggtatcagcagaaaccagatggaactgttaaactcctgatctaccatacatcaagattacactcaggagtcccatcaaggttcagtggcagtgggtctggaacagattattctctcaccattagcaacctggagcaagaagatattgccacttacttttgccaacagggtaatacgcttccgtacacgttcggaggggggaccaagctggagatcacaggtggcggtggctcgggcggtggtgggtcgggtggcggcggatctgaggtgaaactgcaggagtcaggacctggcctggtggcgccctcacagagcctgtccgtcacatgcactgtctcaggggtctcattacccgactatggtgtaagctggattcgccagcctccacgaaagggtctggagtggctgggagtaatatggggtagtgaaaccacatactataattcagctctcaaatccagactgaccatcatcaaggacaactccaagagccaagttttcttaaaaatgaacagtctgcaaactgatgacacagccatttactactgtgccaaacattattactacggtggtagctatgctatggactactggggccaaggaacctcagtcaccgtctcctcaaccacgacgccagcgccgcgaccaccaacaccggcgcccaccatcgcgtcgcagcccctgtccctgcgcccagaggcgtgccggccagcggcggggggcgcagtgcacacgagggggctggacttcgcctgtgatatctacatctgggcgcccttggccgggacttgtggggtccttctcctgtcactggttatcaccctttactgcaaacggggcagaaagaaactcctgtatatattcaaacaaccatttatgagaccagtacaaactactcaagaggaagatggctgtagctgccgatttccagaagaagaagaaggaggatgtgaactgagagtgaagttcagcaggagcgcagacgcccccgcgtacaagcagggccagaaccagctctataacgagctcaatctaggacgaagagaggagtacgatgttttggacaagagacgtggccgggaccctgagatggggggaaagccgagaaggaagaaccctcaggaaggcctgtacaatgaactgcagaaagataagatggcggaggcctacagtgagattgggatgaaaggcgagcgccggaggggcaaggggcacgatggcctttaccagggtctcagtacagccaccaaggacacctacgacgcccttcacatgcaggccctgccccctcgcggatccgaagaaacaagagagctacagtcgttagcggctgctgtggtgccatctgcccagacccttaaaattactgactttagcttcagtgactttgagctgtctgatctggaaacagcactgtgtacaattcggatgtttactgacctcaaccttgtgcagaacttccagatgaaacatgaggttctttgcagatggattttaagtgttaagaagaattatcggaagaatgttgcctatcataattggagacatgcctttaatacagctcagtgcatgtttgctgctctaaaagcaggcaaaattcagaacaagctgactgacctggagatacttgcattgctgattgctgcactaagccacgatttggatcaccgtggtgtgaataactcttacatacagcgaagtgaacatccacttgcccagctttactgccattcaatcatggaacaccatcattttgaccagtgcctgatgattcttaatagtccaggcaatcagattctcagtggcctctccattgaagaatataagaccacgttgaaaataatcaagcaagctattttagctacagacctagcactgtacattaagaggcgaggagaattttttgaacttataagaaaaaatcaattcaatttggaagatcctcatcaaaaggagttgtttttggcaatgctgatgacagcttgtgatctttctgcaattacaaaaccctggcctattcaacaacggatagcagaacttgtagcaactgaattttttgatcaaggagacagagagagaaaagaactcaacatagaacccactgatctaatgaacagggagaagaaaaacaaaatcccaagtatgcaagttgggttcatagatgccatctgcttgcaactgtatgaggccctgacccacgtgtcagaggactgtttccctttgctagatggctgcagaaagaacaggcagaaatggcaggcccttgcagaacagcagggatccggagctactaacttcagcctgctgaagcaggctggagacgtggaggagaaccctggacctatggaagatgccaaaaacattaagaagggcccagcgccattctacccactcgaagacgggaccgccggcgagcagctgcacaaagccatgaagcgctacgccctggtgcccggcaccatcgcctttaccgacgcacatatcgaggtggacattacctacgccgagtacttcgagatgagcgttcggctggcagaagctatgaagcgctatgggctgaatacaaaccatcggatcgtggtgtgcagcgagaatagcttgcagttcttcatgcccgtgttgggtgccctgttcatcggtgtggctgtggccccagctaacgacatctacaacgagcgcgagctgctgaacagcatgggcatcagccagcccaccgtcgtattcgtgagcaagaaagggctgcaaaagatcctcaacgtgcaaaagaagctaccgatcatacaaaagatcatcatcatggatagcaagaccgactaccagggcttccaaagcatgtacaccttcgtgacttcccatttgccacccggcttcaacgagtacgacttcgtgcccgagagcttcgaccgggacaaaaccatcgccctgatcatgaacagtagtggcagtaccggattgcccaagggcgtagccctaccgcaccgcaccgcttgtgtccgattcagtcatgcccgcgaccccatcttcggcaaccagatcatccccgacaccgctatcctcagcgtggtgccatttcaccacggcttcggcatgttcaccacgctgggctacttgatctgcggctttcgggtcgtgctcatgtaccgcttcgaggaggagctattcttgcgcagcttgcaagactataagattcaatctgccctgctggtgcccacactatttagcttcttcgctaagagcactctcatcgacaagtacgacctaagcaacttgcacgagatcgccagcggcggggcgccgctcagcaaggaggtaggtgaggccgtggccaaacgcttccacctaccaggcatccgccagggctacggcctgacagaaacaaccagcgccattctgatcacccccgaaggggacgacaagcctggcgcagtaggcaaggtggtgcccttcttcgaggctaaggtggtggacttggacaccggtaagacactgggtgtgaaccagcgcggcgagctgtgcgtccgtggccccatgatcatgagcggctacgttaacaaccccgaggctacaaacgctctcatcgacaaggacggctggctgcacagcggcgacatcgcctactgggacgaggacgagcacttcttcatcgtggaccggctgaagagcctgatcaaatacaagggctaccaggtagccccagccgaactggagagcatcctgctgcaacaccccaacatcttcgacgccggggtcgccggcctgcccgacgacgatgccggcgagctgcccgccgcagtcgtcgtgctggaacacggtaaaaccatgaccgagaaggagatcgtggactatgtggccagccaggttacaaccgccaagaagctgcgcggtggtgttgtgttcgtggacgaggtgcctaaaggactgaccggcaagttggacgcccgcaagatccgcgagattctcattaaggccaagaagggcggcaagatcgccgtgtga

SEQ ID NO: 8985 - DNA, 3225 bp, Artificial Sequence
  source: /note="Description of Artificial Sequence: Synthetic polynucleotide"
atggccttaccagtgaccgccttgctcctgccgctggccttgctgctccacgccgccaggccggacatccagatgacacagactacatcctccctgtctgcctctctgggagacagagtcaccatcagttgcagggcaagtcaggacattagtaaatatttaaattggtatcagcagaaaccagatggaactgttaaactcctgatctaccatacatcaagattacactcaggagtcccatcaaggttcagtggcagtgggtctggaacagattattctctcaccattagcaacctggagcaagaagatattgccacttacttttgccaacagggtaatacgcttccgtacacgttcggaggggggaccaagctggagatcacaggtggcggtggctcgggcggtggtgggtcgggtggcggcggatctgaggtgaaactgcaggagtcaggacctggcctggtggcgccctcacagagcctgtccgtcacatgcactgtctcaggggtctcattacccgactatggtgtaagctggattcgccagcctccacgaaagggtctggagtggctgggagtaatatggggtagtgaaaccacatactataattcagctctcaaatccagactgaccatcatcaaggacaactccaagagccaagttttcttaaaaatgaacagtctgcaaactgatgacacagccatttactactgtgccaaacattattactacggtggtagctatgctatggactactggggccaaggaacctcagtcaccgtctcctcaaccacgacgccagcgccgcgaccaccaacaccggcgcccaccatcgcgtcgcagcccctgtccctgcgcccagaggcgtgccggccagcggcggggggcgcagtgcacacgagggggctggacttcgcctgtgatatctacatctgggcgcccttggccgggacttgtggggtccttctcctgtcactggttatcaccctttactgcaaacggggcagaaagaaactcctgtatatattcaaacaaccatttatgagaccagtacaaactactcaagaggaagatggctgtagctgccgatttccagaagaagaagaaggaggatgtgaactgagagtgaagttcagcaggagcgcagacgcccccgcgtacaagcagggccagaaccagctctataacgagctcaatctaggacgaagagaggagtacgatgttttggacaagagacgtggccgggaccctgagatggggggaaagccgagaaggaagaaccctcaggaaggcctgtacaatgaactgcagaaagataagatggcggaggcctacagtgagattgggatgaaaggcgagcgccggaggggcaaggggcacgatggcctttaccagggtctcagtacagccaccaaggacacctacgacgcccttcacatgcaggccctgccccctcgcggatccgaagaaacaagagagctacagtcgttagcggctgctgtggtgccatctgcccagacccttaaaattactgactttagcttcagtgactttgagctgtctgatctggaaacagcactgtgtacaattcggatgtttactgacctcaaccttgtgcagaacttccagatgaaacatgaggttctttgcagatggattttaagtgttaagaagaattatcggaagaatgttgcctatcataattggagacatgcctttaatacagctcagtgcatgtttgctgctctaaaagcaggcaaaattcagaacaagctgactgacctggagatacttgcattgctgattgctgcactaagcgccgatttggatcaccgtggtgtgaataactcttacatacagcgaagtgaacatccacttgcccagctttactgccattcaatcatggaacaccatcattttgaccagtgcctgatgattcttaatagtccaggcaatcagattctcagtggcctctccattgaagaatataagaccacgttgaaaataatcaagcaagctattttagctacagacctagcactgtacattaagaggctaggagaattttttgaacttataagaaaaaatcaattcaatttggaagatcctcatcaaaaggagttgtttttggcaatgctgatgacagcttgtgatctttctgcaattacaaaaccctggcctattcaacaacggatagcagaacttgtagcaactgaattttttgatcaaggagacagagagagaaaagaactcaacatagaacccactgatctaatgaacagggagaagaaaaacaaaatcccaagtatgcaagttgggttcatagatgccatctgcttgcaactgtatgaggccctgacccacgtgtcagaggactgtttccctttgctagatggctgcagaaagaacaggcagaaatggcaggcccttgcagaacagcagggatccggagctactaacttcagcctgctgaagcaggctggagacgtggaggagaaccctggacctgtgagcaagggcgaggagctgttcaccggggtggtgcccatcctggtcgagctggacggcgacgtaaacggccacaagttcagcgtgtccggcgagggcgagggcgatgccacctacggcaagctgaccctgaagttcatctgcaccaccggcaagctgcccgtgccctggcccaccctcgtgaccaccctgacctacggcgtgcagtgcttcagccgctaccccgaccacatgaagcagcacgacttcttcaagtccgccatgcccgaaggctacgtccaggagcgcaccatcttcttcaaggacgacggcaactacaagacccgcgccgaggtgaagttcgagggcgacaccctggtgaaccgcatcgagctgaagggcatcgacttcaaggaggacggcaacatcctggggcacaagctggagtacaactacaacagccacaacgtctatatcatggccgacaagcagaagaacggcatcaaggtgaacttcaagatccgccacaacatcgaggacggcagcgtgcagctcgccgaccactaccagcagaacacccccatcggcgacggccccgtgctgctgcccgacaaccactacctgagcacccagtccgccctgagcaaagaccccaacgagaagcgcgatcacatggtcctgctggagttcgtgaccgccgccgggatcactctcggcatggacgagctgtacaagtaa

SEQ ID NO: 8986 - DNA, 3225 bp, Artificial Sequence
  source: /note="Description of Artificial Sequence: Synthetic polynucleotide"
atggccttaccagtgaccgccttgctcctgccgctggccttgctgctccacgccgccaggccggacatccagatgacacagactacatcctccctgtctgcctctctgggagacagagtcaccatcagttgcagggcaagtcaggacattagtaaatatttaaattggtatcagcagaaaccagatggaactgttaaactcctgatctaccatacatcaagattacactcaggagtcccatcaaggttcagtggcagtgggtctggaacagattattctctcaccattagcaacctggagcaagaagatattgccacttacttttgccaacagggtaatacgcttccgtacacgttcggaggggggaccaagctggagatcacaggtggcggtggctcgggcggtggtgggtcgggtggcggcggatctgaggtgaaactgcaggagtcaggacctggcctggtggcgccctcacagagcctgtccgtcacatgcactgtctcaggggtctcattacccgactatggtgtaagctggattcgccagcctccacgaaagggtctggagtggctgggagtaatatggggtagtgaaaccacatactataattcagctctcaaatccagactgaccatcatcaaggacaactccaagagccaagttttcttaaaaatgaacagtctgcaaactgatgacacagccatttactactgtgccaaacattattactacggtggtagctatgctatggactactggggccaaggaacctcagtcaccgtctcctcaaccacgacgccagcgccgcgaccaccaacaccggcgcccaccatcgcgtcgcagcccctgtccctgcgcccagaggcgtgccggccagcggcggggggcgcagtgcacacgagggggctggacttcgcctgtgatatctacatctgggcgcccttggccgggacttgtggggtccttctcctgtcactggttatcaccctttactgcaaacggggcagaaagaaactcctgtatatattcaaacaaccatttatgagaccagtacaaactactcaagaggaagatggctgtagctgccgatttccagaagaagaagaaggaggatgtgaactgagagtgaagttcagcaggagcgcagacgcccccgcgtacaagcagggccagaaccagctctataacgagctcaatctaggacgaagagaggagtacgatgttttggacaagagacgtggccgggaccctgagatggggggaaagccgagaaggaagaaccctcaggaaggcctgtacaatgaactgcagaaagataagatggcggaggcctacagtgagattgggatgaaaggcgagcgccggaggggcaaggggcacgatggcctttaccagggtctcagtacagccaccaaggacacctacgacgcccttcacatgcaggccctgccccctcgcggatccgaagaaacaagagagctacagtcgttagcggctgctgtggtgccatctgcccagacccttaaaattactgactttagcttcagtgactttgagctgtctgatctggaaacagcactgtgtacaattcggatgtttactgacctcaaccttgtgcagaacttccagatgaaacatgaggttctttgcagatggattttaagtgttaagaagaattatcggaagaatgttgcctatcataattggagacatgcctttaatacagctcagtgcatgtttgctgctctaaaagcaggcaaaattcagaacaagctgactgacctggagatacttgcattgctgattgctgcactaagccacgatttggatcaccgtggtgtgaataactcttacatacagcgaagtgaacatccacttgcccagctttactgccattcaatcatggaacaccatcattttgaccagtgcctgatgattcttaatagtccaggcaatcagattctcagtggcctctccattgaagaatataagaccacgttgaaaataatcaagcaagctattttagctacagacctagcactgtacattaagaggcgaggagaattttttgaacttataagaaaaaatcaattcaatttggaagatcctcatcaaaaggagttgtttttggcaatgctgatgacagcttgtgatctttctgcaattacaaaaccctggcctattcaacaacggatagcagaacttgtagcaactgaattttttgatcaaggagacagagagagaaaagaactcaacatagaacccactgatctaatgaacagggagaagaaaaacaaaatcccaagtatgcaagttgggttcatagatgccatctgcttgcaactgtatgaggccctgacccacgtgtcagaggactgtttccctttgctagatggctgcagaaagaacaggcagaaatggcaggcccttgcagaacagcagggatccggagctactaacttcagcctgctgaagcaggctggagacgtggaggagaaccctggacctgtgagcaagggcgaggagctgttcaccggggtggtgcccatcctggtcgagctggacggcgacgtaaacggccacaagttcagcgtgtccggcgagggcgagggcgatgccacctacggcaagctgaccctgaagttcatctgcaccaccggcaagctgcccgtgccctggcccaccctcgtgaccaccctgacctacggcgtgcagtgcttcagccgctaccccgaccacatgaagcagcacgacttcttcaagtccgccatgcccgaaggctacgtccaggagcgcaccatcttcttcaaggacgacggcaactacaagacccgcgccgaggtgaagttcgagggcgacaccctggtgaaccgcatcgagctgaagggcatcgacttcaaggaggacggcaacatcctggggcacaagctggagtacaactacaacagccacaacgtctatatcatggccgacaagcagaagaacggcatcaaggtgaacttcaagatccgccacaacatcgaggacggcagcgtgcagctcgccgaccactaccagcagaacacccccatcggcgacggccccgtgctgctgcccgacaaccactacctgagcacccagtccgccctgagcaaagaccccaacgagaagcgcgatcacatggtcctgctggagttcgtgaccgccgccgggatcactctcggcatggacgagctgtacaagtaa

SEQ ID NO: 8987 - DNA, 2451 bp, Artificial Sequence
  source: /note="Description of Artificial Sequence: Synthetic polynucleotide"
atggccttaccagtgaccgccttgctcctgccgctggccttgctgctccacgccgccaggccgggatccgaagaaacaagagagctacagtcgttagcggctgctgtggtgccatctgcccagacccttaaaattactgactttagcttcagtgactttgagctgtctgatctggaaacagcactgtgtacaattcggatgtttactgacctcaaccttgtgcagaacttccagatgaaacatgaggttctttgcagatggattttaagtgttaagaagaattatcggaagaatgttgcctatcataattggagacatgcctttaatacagctcagtgcatgtttgctgctctaaaagcaggcaaaattcagaacaagctgactgacctggagatacttgcattgctgattgctgcactaagcgccgatttggatcaccgtggtgtgaataactcttacatacagcgaagtgaacatccacttgcccagctttactgccattcaatcatggaacaccatcattttgaccagtgcctgatgattcttaatagtccaggcaatcagattctcagtggcctctccattgaagaatataagaccacgttgaaaataatcaagcaagctattttagctacagacctagcactgtacattaagaggctaggagaattttttgaacttataagaaaaaatcaattcaatttggaagatcctcatcaaaaggagttgtttttggcaatgctgatgacagcttgtgatctttctgcaattacaaaaccctggcctattcaacaacggatagcagaacttgtagcaactgaattttttgatcaaggagacagagagagaaaagaactcaacatagaacccactgatctaatgaacagggagaagaaaaacaaaatcccaagtatgcaagttgggttcatagatgccatctgcttgcaactgtatgaggccctgacccacgtgtcagaggactgtttccctttgctagatggctgcagaaagaacaggcagaaatggcaggcccttgcagaacagcagggatccgacatccagatgacacagactacatcctccctgtctgcctctctgggagacagagtcaccatcagttgcagggcaagtcaggacattagtaaatatttaaattggtatcagcagaaaccagatggaactgttaaactcctgatctaccatacatcaagattacactcaggagtcccatcaaggttcagtggcagtgggtctggaacagattattctctcaccattagcaacctggagcaagaagatattgccacttacttttgccaacagggtaatacgcttccgtacacgttcggaggggggaccaagctggagatcacaggtggcggtggctcgggcggtggtgggtcgggtggcggcggatctgaggtgaaactgcaggagtcaggacctggcctggtggcgccctcacagagcctgtccgtcacatgcactgtctcaggggtctcattacccgactatggtgtaagctggattcgccagcctccacgaaagggtctggagtggctgggagtaatatggggtagtgaaaccacatactataattcagctctcaaatccagactgaccatcatcaaggacaactccaagagccaagttttcttaaaaatgaacagtctgcaaactgatgacacagccatttactactgtgccaaacattattactacggtggtagctatgctatggactactggggccaaggaacctcagtcaccgtctcctcaaccacgacgccagcgccgcgaccaccaacaccggcgcccaccatcgcgtcgcagcccctgtccctgcgcccagaggcgtgccggccagcggcggggggcgcagtgcacacgagggggctggacttcgcctgtgatatctacatctgggcgcccttggccgggacttgtggggtccttctcctgtcactggttatcaccctttactgcaaacggggcagaaagaaactcctgtatatattcaaacaaccatttatgagaccagtacaaactactcaagaggaagatggctgtagctgccgatttccagaagaagaagaaggaggatgtgaactgagagtgaagttcagcaggagcgcagacgcccccgcgtacaagcagggccagaaccagctctataacgagctcaatctaggacgaagagaggagtacgatgttttggacaagagacgtggccgggaccctgagatggggggaaagccgagaaggaagaaccctcaggaaggcctgtacaatgaactgcagaaagataagatggcggaggcctacagtgagattgggatgaaaggcgagcgccggaggggcaaggggcacgatggcctttaccagggtctcagtacagccaccaaggacacctacgacgcccttcacatgcaggccctgccccctcgctaa

SEQ ID NO: 8988 - DNA, 2487 bp, Artificial Sequence
  source: /note="Description of Artificial Sequence: Synthetic polynucleotide"
atggccttaccagtgaccgccttgctcctgccgctggccttgctgctccacgccgccaggccgggatccgaagaaacaagagagctacagtcgttagcggctgctgtggtgccatctgcccagacccttaaaattactgactttagcttcagtgactttgagctgtctgatctggaaacagcactgtgtacaattcggatgtttactgacctcaaccttgtgcagaacttccagatgaaacatgaggttctttgcagatggattttaagtgttaagaagaattatcggaagaatgttgcctatcataattggagacatgcctttaatacagctcagtgcatgtttgctgctctaaaagcaggcaaaattcagaacaagctgactgacctggagatacttgcattgctgattgctgcactaagcgccgatttggatcaccgtggtgtgaataactcttacatacagcgaagtgaacatccacttgcccagctttactgccattcaatcatggaacaccatcattttgaccagtgcctgatgattcttaatagtccaggcaatcagattctcagtggcctctccattgaagaatataagaccacgttgaaaataatcaagcaagctattttagctacagacctagcactgtacattaagaggctaggagaattttttgaacttataagaaaaaatcaattcaatttggaagatcctcatcaaaaggagttgtttttggcaatgctgatgacagcttgtgatctttctgcaattacaaaaccctggcctattcaacaacggatagcagaacttgtagcaactgaattttttgatcaaggagacagagagagaaaagaactcaacatagaacccactgatctaatgaacagggagaagaaaaacaaaatcccaagtatgcaagttgggttcatagatgccatctgcttgcaactgtatgaggccctgacccacgtgtcagaggactgtttccctttgctagatggctgcagaaagaacaggcagaaatggcaggcccttgcagaacagcagggatccgagtccaggagagtgcggcgcaacaagaggagcaaggacatccagatgacacagactacatcctccctgtctgcctctctgggagacagagtcaccatcagttgcagggcaagtcaggacattagtaaatatttaaattggtatcagcagaaaccagatggaactgttaaactcctgatctaccatacatcaagattacactcaggagtcccatcaaggttcagtggcagtgggtctggaacagattattctctcaccattagcaacctggagcaagaagatattgccacttacttttgccaacagggtaatacgcttccgtacacgttcggaggggggaccaagctggagatcacaggtggcggtggctcgggcggtggtgggtcgggtggcggcggatctgaggtgaaactgcaggagtcaggacctggcctggtggcgccctcacagagcctgtccgtcacatgcactgtctcaggggtctcattacccgactatggtgtaagctggattcgccagcctccacgaaagggtctggagtggctgggagtaatatggggtagtgaaaccacatactataattcagctctcaaatccagactgaccatcatcaaggacaactccaagagccaagttttcttaaaaatgaacagtctgcaaactgatgacacagccatttactactgtgccaaacattattactacggtggtagctatgctatggactactggggccaaggaacctcagtcaccgtctcctcaaccacgacgccagcgccgcgaccaccaacaccggcgcccaccatcgcgtcgcagcccctgtccctgcgcccagaggcgtgccggccagcggcggggggcgcagtgcacacgagggggctggacttcgcctgtgatatctacatctgggcgcccttggccgggacttgtggggtccttctcctgtcactggttatcaccctttactgcaaacggggcagaaagaaactcctgtatatattcaaacaaccatttatgagaccagtacaaactactcaagaggaagatggctgtagctgccgatttccagaagaagaagaaggaggatgtgaactgagagtgaagttcagcaggagcgcagacgcccccgcgtacaagcagggccagaaccagctctataacgagctcaatctaggacgaagagaggagtacgatgttttggacaagagacgtggccgggaccctgagatggggggaaagccgagaaggaagaaccctcaggaaggcctgtacaatgaactgcagaaagataagatggcggaggcctacagtgagattgggatgaaaggcgagcgccggaggggcaaggggcacgatggcctttaccagggtctcagtacagccaccaaggacacctacgacgcccttcacatgcaggccctgccccctcgctaa

SEQ ID NO: 8989 - DNA, 2445 bp, Artificial Sequence
  source: /note="Description of Artificial Sequence: Synthetic polynucleotide"
atggccttaccagtgaccgccttgctcctgccgctggccttgctgctccacgccgccaggccggacatccagatgacacagactacatcctccctgtctgcctctctgggagacagagtcaccatcagttgcagggcaagtcaggacattagtaaatatttaaattggtatcagcagaaaccagatggaactgttaaactcctgatctaccatacatcaagattacactcaggagtcccatcaaggttcagtggcagtgggtctggaacagattattctctcaccattagcaacctggagcaagaagatattgccacttacttttgccaacagggtaatacgcttccgtacacgttcggaggggggaccaagctggagatcacaggtggcggtggctcgggcggtggtgggtcgggtggcggcggatctgaggtgaaactgcaggagtcaggacctggcctggtggcgccctcacagagcctgtccgtcacatgcactgtctcaggggtctcattacccgactatggtgtaagctggattcgccagcctccacgaaagggtctggagtggctgggagtaatatggggtagtgaaaccacatactataattcagctctcaaatccagactgaccatcatcaaggacaactccaagagccaagttttcttaaaaatgaacagtctgcaaactgatgacacagccatttactactgtgccaaacattattactacggtggtagctatgctatggactactggggccaaggaacctcagtcaccgtctcctcagctagcttcgaaattgaagttatgtatcctcctccttacctagacaatgagaagagcaatggaaccattatccatgtgaaagggaaacacctttgtccaagtcccctatttcccggaccttctaagcccttttgggtgctggtggtggttgggggagtcctggcttgctatagcttgctagtaacagtggcctttattattttctgggtgaggagtaagaggagcaggctcctgcacagtgactacatgaacatgactccccgcagacccggacccacccgcaagcattaccagccctatgccccaccacgcgacttcgcagcctatcgctccagagtgaagttcagcaggagcgcagacgcccccgcgtacaagcagggccagaaccagctctataacgagctcaatctaggacgaagagaggagtacgatgttttggacaagagacgtggccgggaccctgagatggggggaaagccgagaaggaagaaccctcaggaaggcctgtacaatgaactgcagaaagataagatggcggaggcctacagtgagattgggatgaaaggcgagcgccggaggggcaaggggcacgatggcctttaccagggtctcagtacagccaccaaggacacctacgacgcccttcacatgcaggccctgccccctcgcggatccgaagaaacaagagagctacagtcgttagcggctgctgtggtgccatctgcccagacccttaaaattactgactttagcttcagtgactttgagctgtctgatctggaaacagcactgtgtacaattcggatgtttactgacctcaaccttgtgcagaacttccagatgaaacatgaggttctttgcagatggattttaagtgttaagaagaattatcggaagaatgttgcctatcataattggagacatgcctttaatacagctcagtgcatgtttgctgctctaaaagcaggcaaaattcagaacaagctgactgacctggagatacttgcattgctgattgctgcactaagcgccgatttggatcaccgtggtgtgaataactcttacatacagcgaagtgaacatccacttgcccagctttactgccattcaatcatggaacaccatcattttgaccagtgcctgatgattcttaatagtccaggcaatcagattctcagtggcctctccattgaagaatataagaccacgttgaaaataatcaagcaagctattttagctacagacctagcactgtacattaagaggctaggagaattttttgaacttataagaaaaaatcaattcaatttggaagatcctcatcaaaaggagttgtttttggcaatgctgatgacagcttgtgatctttctgcaattacaaaaccctggcctattcaacaacggatagcagaacttgtagcaactgaattttttgatcaaggagacagagagagaaaagaactcaacatagaacccactgatctaatgaacagggagaagaaaaacaaaatcccaagtatgcaagttgggttcatagatgccatctgcttgcaactgtatgaggccctgacccacgtgtcagaggactgtttccctttgctagatggctgcagaaagaacaggcagaaatggcaggcccttgcagaacagcagtga

SEQ ID NO: 8990 - DNA, 2451 bp, Artificial Sequence
  source: /note="Description of Artificial Sequence: Synthetic polynucleotide"
atggccttaccagtgaccgccttgctcctgccgctggccttgctgctccacgccgccaggccggacatccagatgacacagactacatcctccctgtctgcctctctgggagacagagtcaccatcagttgcagggcaagtcaggacattagtaaatatttaaattggtatcagcagaaaccagatggaactgttaaactcctgatctaccatacatcaagattacactcaggagtcccatcaaggttcagtggcagtgggtctggaacagattattctctcaccattagcaacctggagcaagaagatattgccacttacttttgccaacagggtaatacgcttccgtacacgttcggaggggggaccaagctggagatcacaggtggcggtggctcgggcggtggtgggtcgggtggcggcggatctgaggtgaaactgcaggagtcaggacctggcctggtggcgccctcacagagcctgtccgtcacatgcactgtctcaggggtctcattacccgactatggtgtaagctggattcgccagcctccacgaaagggtctggagtggctgggagtaatatggggtagtgaaaccacatactataattcagctctcaaatccagactgaccatcatcaaggacaactccaagagccaagttttcttaaaaatgaacagtctgcaaactgatgacacagccatttactactgtgccaaacattattactacggtggtagctatgctatggactactggggccaaggaacctcagtcaccgtctcctcaaccacgacgccagcgccgcgaccaccaacaccggcgcccaccatcgcgtcgcagcccctgtccctgcgcccagaggcgtgccggccagcggcggggggcgcagtgcacacgagggggctggacttcgcctgtgatatctacatctgggcgcccttggccgggacttgtggggtccttctcctgtcactggttatcaccctttactgcaaacggggcagaaagaaactcctgtatatattcaaacaaccatttatgagaccagtacaaactactcaagaggaagatggctgtagctgccgatttccagaagaagaagaaggaggatgtgaactgggatccgaagaaacaagagagctacagtcgttagcggctgctgtggtgccatctgcccagacccttaaaattactgactttagcttcagtgactttgagctgtctgatctggaaacagcactgtgtacaattcggatgtttactgacctcaaccttgtgcagaacttccagatgaaacatgaggttctttgcagatggattttaagtgttaagaagaattatcggaagaatgttgcctatcataattggagacatgcctttaatacagctcagtgcatgtttgctgctctaaaagcaggcaaaattcagaacaagctgactgacctggagatacttgcattgctgattgctgcactaagcgccgatttggatcaccgtggtgtgaataactcttacatacagcgaagtgaacatccacttgcccagctttactgccattcaatcatggaacaccatcattttgaccagtgcctgatgattcttaatagtccaggcaatcagattctcagtggcctctccattgaagaatataagaccacgttgaaaataatcaagcaagctattttagctacagacctagcactgtacattaagaggctaggagaattttttgaacttataagaaaaaatcaattcaatttggaagatcctcatcaaaaggagttgtttttggcaatgctgatgacagcttgtgatctttctgcaattacaaaaccctggcctattcaacaacggatagcagaacttgtagcaactgaattttttgatcaaggagacagagagagaaaagaactcaacatagaacccactgatctaatgaacagggagaagaaaaacaaaatcccaagtatgcaagttgggttcatagatgccatctgcttgcaactgtatgaggccctgacccacgtgtcagaggactgtttccctttgctagatggctgcagaaagaacaggcagaaatggcaggcccttgcagaacagcagggatccagagtgaagttcagcaggagcgcagacgcccccgcgtacaagcagggccagaaccagctctataacgagctcaatctaggacgaagagaggagtacgatgttttggacaagagacgtggccgggaccctgagatggggggaaagccgagaaggaagaaccctcaggaaggcctgtacaatgaactgcagaaagataagatggcggaggcctacagtgagattgggatgaaaggcgagcgccggaggggcaaggggcacgatggcctttaccagggtctcagtacagccaccaaggacacctacgacgcccttcacatgcaggccctgccccctcgctaa

SEQ ID NO: 8991 - DNA, 2451 bp, Artificial Sequence
  source: /note="Description of Artificial Sequence: Synthetic polynucleotide"
atggccttaccagtgaccgccttgctcctgccgctggccttgctgctccacgccgccaggccggacatccagatgacacagactacatcctccctgtctgcctctctgggagacagagtcaccatcagttgcagggcaagtcaggacattagtaaatatttaaattggtatcagcagaaaccagatggaactgttaaactcctgatctaccatacatcaagattacactcaggagtcccatcaaggttcagtggcagtgggtctggaacagattattctctcaccattagcaacctggagcaagaagatattgccacttacttttgccaacagggtaatacgcttccgtacacgttcggaggggggaccaagctggagatcacaggtggcggtggctcgggcggtggtgggtcgggtggcggcggatctgaggtgaaactgcaggagtcaggacctggcctggtggcgccctcacagagcctgtccgtcacatgcactgtctcaggggtctcattacccgactatggtgtaagctggattcgccagcctccacgaaagggtctggagtggctgggagtaatatggggtagtgaaaccacatactataattcagctctcaaatccagactgaccatcatcaaggacaactccaagagccaagttttcttaaaaatgaacagtctgcaaactgatgacacagccatttactactgtgccaaacattattactacggtggtagctatgctatggactactggggccaaggaacctcagtcaccgtctcctcaaccacgacgccagcgccgcgaccaccaacaccggcgcccaccatcgcgtcgcagcccctgtccctgcgcccagaggcgtgccggccagcggcggggggcgcagtgcacacgagggggctggacttcgcctgtgatatctacatctgggcgcccttggccgggacttgtggggtccttctcctgtcactggttatcaccctttactgcaaacggggcagaaagaaactcctgtatatattcaaacaaccatttatgagaccagtacaaactactcaagaggaagatggctgtagctgccgatttccagaagaagaagaaggaggatgtgaactgggatccgaagaaacaagagagctacagtcgttagcggctgctgtggtgccatctgcccagacccttaaaattactgactttagcttcagtgactttgagctgtctgatctggaaacagcactgtgtacaattcggatgtttactgacctcaaccttgtgcagaacttccagatgaaacatgaggttctttgcagatggattttaagtgttaagaagaattatcggaagaatgttgcctatcataattggagacatgcctttaatacagctcagtgcatgtttgctgctctaaaagcaggcaaaattcagaacaagctgactgacctggagatacttgcattgctgattgctgcactaagccacgatttggatcaccgtggtgtgaataactcttacatacagcgaagtgaacatccacttgcccagctttactgccattcaatcatggaacaccatcattttgaccagtgcctgatgattcttaatagtccaggcaatcagattctcagtggcctctccattgaagaatataagaccacgttgaaaataatcaagcaagctattttagctacagacctagcactgtacattaagaggcgaggagaattttttgaacttataagaaaaaatcaattcaatttggaagatcctcatcaaaaggagttgtttttggcaatgctgatgacagcttgtgatctttctgcaattacaaaaccctggcctattcaacaacggatagcagaacttgtagcaactgaattttttgatcaaggagacagagagagaaaagaactcaacatagaacccactgatctaatgaacagggagaagaaaaacaaaatcccaagtatgcaagttgggttcatagatgccatctgcttgcaactgtatgaggccctgacccacgtgtcagaggactgtttccctttgctagatggctgcagaaagaacaggcagaaatggcaggcccttgcagaacagcagggatccagagtgaagttcagcaggagcgcagacgcccccgcgtacaagcagggccagaaccagctctataacgagctcaatctaggacgaagagaggagtacgatgttttggacaagagacgtggccgggaccctgagatggggggaaagccgagaaggaagaaccctcaggaaggcctgtacaatgaactgcagaaagataagatggcggaggcctacagtgagattgggatgaaaggcgagcgccggaggggcaaggggcacgatggcctttaccagggtctcagtacagccaccaaggacacctacgacgcccttcacatgcaggccctgccccctcgctaa

SEQ ID NO: 8992 - DNA, 2445 bp, Artificial Sequence
  source: /note="Description of Artificial Sequence: Synthetic polynucleotide"
atggccttaccagtgaccgccttgctcctgccgctggccttgctgctccacgccgccaggccggacatccagatgacacagactacatcctccctgtctgcctctctgggagacagagtcaccatcagttgcagggcaagtcaggacattagtaaatatttaaattggtatcagcagaaaccagatggaactgttaaactcctgatctaccatacatcaagattacactcaggagtcccatcaaggttcagtggcagtgggtctggaacagattattctctcaccattagcaacctggagcaagaagatattgccacttacttttgccaacagggtaatacgcttccgtacacgttcggaggggggaccaagctggagatcacaggtggcggtggctcgggcggtggtgggtcgggtggcggcggatctgaggtgaaactgcaggagtcaggacctggcctggtggcgccctcacagagcctgtccgtcacatgcactgtctcaggggtctcattacccgactatggtgtaagctggattcgccagcctccacgaaagggtctggagtggctgggagtaatatggggtagtgaaaccacatactataattcagctctcaaatccagactgaccatcatcaaggacaactccaagagccaagttttcttaaaaatgaacagtctgcaaactgatgacacagccatttactactgtgccaaacattattactacggtggtagctatgctatggactactggggccaaggaacctcagtcaccgtctcctcaaccacgacgccagcgccgcgaccaccaacaccggcgcccaccatcgcgtcgcagcccctgtccctgcgcccagaggcgtgccggccagcggcggggggcgcagtgcacacgagggggctggacttcgcctgtgatatctacatctgggcgcccttggccgggacttgtggggtccttctcctgtcactggttatcaccctttactgcaaacggggcagaaagaaactcctgtatatattcaaacaaccatttatgagaccagtacaaactactcaagaggaagatggctgtagctgccgatttccagaagaagaagaaggaggatgtgaactgagagtgaagttcagcaggagcgcagacgcccccgcgtacaagcagggccagaaccagctctataacgagctcaatctaggacgaagagaggagtacgatgttttggacaagagacgtggccgggaccctgagatggggggaaagccgagaaggaagaaccctcaggaaggcctgtacaatgaactgcagaaagataagatggcggaggcctacagtgagattgggatgaaaggcgagcgccggaggggcaaggggcacgatggcctttaccagggtctcagtacagccaccaaggacacctacgacgcccttcacatgcaggccctgccccctcgcggatccgaagaaacaagagagctacagtcgttagcggctgctgtggtgccatctgcccagacccttaaaattactgactttagcttcagtgactttgagctgtctgatctggaaacagcactgtgtacaattcggatgtttactgacctcaaccttgtgcagaacttccagatgaaacatgaggttctttgcagatggattttaagtgttaagaagaattatcggaagaatgttgcctatcataattggagacatgcctttaatacagctcagtgcatgtttgctgctctaaaagcaggcaaaattcagaacaagctgactgacctggagatacttgcattgctgattgctgcactaagccacgatttggatcaccgtggtgtgaataactcttacatacagcgaagtgaacatccacttgcccagctttactgccattcaatcatggaacaccatcattttgaccagtgcctgatgattcttaatagtccaggcaatcagattctcagtggcctctccattgaagaatataagaccacgttgaaaataatcaagcaagctattttagctacagacctagcactgtacattaagaggcgaggagaattttttgaacttataagaaaaaatcaattcaatttggaagatcctcatcaaaaggagttgtttttggcaatgctgatgacagcttgtgatctttctgcaattacaaaaccctggcctattcaacaacggatagcagaacttgtagcaactgaattttttgatcaaggagacagagagagaaaagaactcaacatagaacccactgatctaatgaacagggagaagaaaaacaaaatcccaagtatgcaagttgggttcatagatgccatctgcttgcaactgtatgaggccctgacccacgtgtcagaggactgtttccctttgctagatggctgcagaaagaacaggcagaaatggcaggcccttgcagaacagcagtga

SEQ ID NO: 8993 - DNA, 2445 bp, Artificial Sequence
  source: /note="Description of Artificial Sequence: Synthetic polynucleotide"
atggccttaccagtgaccgccttgctcctgccgctggccttgctgctccacgccgccaggccggacatccagatgacacagactacatcctccctgtctgcctctctgggagacagagtcaccatcagttgcagggcaagtcaggacattagtaaatatttaaattggtatcagcagaaaccagatggaactgttaaactcctgatctaccatacatcaagattacactcaggagtcccatcaaggttcagtggcagtgggtctggaacagattattctctcaccattagcaacctggagcaagaagatattgccacttacttttgccaacagggtaatacgcttccgtacacgttcggaggggggaccaagctggagatcacaggtggcggtggctcgggcggtggtgggtcgggtggcggcggatctgaggtgaaactgcaggagtcaggacctggcctggtggcgccctcacagagcctgtccgtcacatgcactgtctcaggggtctcattacccgactatggtgtaagctggattcgccagcctccacgaaagggtctggagtggctgggagtaatatggggtagtgaaaccacatactataattcagctctcaaatccagactgaccatcatcaaggacaactccaagagccaagttttcttaaaaatgaacagtctgcaaactgatgacacagccatttactactgtgccaaacattattactacggtggtagctatgctatggactactggggccaaggaacctcagtcaccgtctcctcaaccacgacgccagcgccgcgaccaccaacaccggcgcccaccatcgcgtcgcagcccctgtccctgcgcccagaggcgtgccggccagcggcggggggcgcagtgcacacgagggggctggacttcgcctgtgatatctacatctgggcgcccttggccgggacttgtggggtccttctcctgtcactggttatcaccctttactgcaaacggggcagaaagaaactcctgtatatattcaaacaaccatttatgagaccagtacaaactactcaagaggaagatggctgtagctgccgatttccagaagaagaagaaggaggatgtgaactgagagtgaagttcagcaggagcgcagacgcccccgcgtacaagcagggccagaaccagctctataacgagctcaatctaggacgaagagaggagtacgatgttttggacaagagacgtggccgggaccctgagatggggggaaagccgagaaggaagaaccctcaggaaggcctgtacaatgaactgcagaaagataagatggcggaggcctacagtgagattgggatgaaaggcgagcgccggaggggcaaggggcacgatggcctttaccagggtctcagtacagccaccaaggacacctacgacgcccttcacatgcaggccctgccccctcgcggatccgaagaaacaagagagctacagtcgttagcggctgctgtggtgccatctgcccagacccttaaaattactgactttagcttcagtgactttgagctgtctgatctggaaacagcactgtgtacaattcggatgtttactgacctcaaccttgtgcagaacttccagatgaaacatgaggttctttgcagatggattttaagtgttaagaagaattatcggaagaatgttgcctatcataattggagacatgcctttaatacagctcagtgcatgtttgctgctctaaaagcaggcaaaattcagaacaagctgactgacctggagatacttgcattgctgattgctgcactaagccacgatttggatcaccgtggtgtgaataactcttacatacagcgaagtgaacatccacttgcccagctttactgccattcaatcatggaacaccatcattttgaccagtgcctgatgattcttaatagtccaggcaatcagattctcagtggcctctccattgaagaatataagaccacgttgaaaataatcaagcaagctattttagctacagacctagcactgtacattaagaggctaggagaatttgctgaacttataagaaaaaatcaattcaatttggaagatcctcatcaaaaggagttgtttttggcaatgctgatgacagcttgtgatctttctgcaattacaaaaccctggcctattcaacaacggatagcagaacttgtagcaactgaattttttgatcaaggagacagagagagaaaagaactcaacatagaacccactgatctaatgaacagggagaagaaaaacaaaatcccaagtatgcaagttgggttcatagatgccatctgcttgcaactgtatgaggccctgacccacgtgtcagaggactgtttccctttgctagatggctgcagaaagaacaggcagaaatggcaggcccttgcagaacagcagtga

SEQ ID NO: 8994 - DNA, 2451 bp, Artificial Sequence
  source: /note="Description of Artificial Sequence: Synthetic polynucleotide"
atggccttaccagtgaccgccttgctcctgccgctggccttgctgctccacgccgccaggccggacatccagatgacacagactacatcctccctgtctgcctctctgggagacagagtcaccatcagttgcagggcaagtcaggacattagtaaatatttaaattggtatcagcagaaaccagatggaactgttaaactcctgatctaccatacatcaagattacactcaggagtcccatcaaggttcagtggcagtgggtctggaacagattattctctcaccattagcaacctggagcaagaagatattgccacttacttttgccaacagggtaatacgcttccgtacacgttcggaggggggaccaagctggagatcacaggtggcggtggctcgggcggtggtgggtcgggtggcggcggatctgaggtgaaactgcaggagtcaggacctggcctggtggcgccctcacagagcctgtccgtcacatgcactgtctcaggggtctcattacccgactatggtgtaagctggattcgccagcctccacgaaagggtctggagtggctgggagtaatatggggtagtgaaaccacatactataattcagctctcaaatccagactgaccatcatcaaggacaactccaagagccaagttttcttaaaaatgaacagtctgcaaactgatgacacagccatttactactgtgccaaacattattactacggtggtagctatgctatggactactggggccaaggaacctcagtcaccgtctcctcaaccacgacgccagcgccgcgaccaccaacaccggcgcccaccatcgcgtcgcagcccctgtccctgcgcccagaggcgtgccggccagcggcggggggcgcagtgcacacgagggggctggacttcgcctgtgatatctacatctgggcgcccttggccgggacttgtggggtccttctcctgtcactggttatcaccctttactgcaaacggggcagaaagaaactcctgtatatattcaaacaaccatttatgagaccagtacaaactactcaagaggaagatggctgtagctgccgatttccagaagaagaagaaggaggatgtgaactgggatccgaagaaacaagagagctacagtcgttagcggctgctgtggtgccatctgcccagacccttaaaattactgactttagcttcagtgactttgagctgtctgatctggaaacagcactgtgtacaattcggatgtttactgacctcaaccttgtgcagaacttccagatgaaacatgaggttctttgcagatggattttaagtgttaagaagaattatcggaagaatgttgcctatcataattggagacatgcctttaatacagctcagtgcatgtttgctgctctaaaagcaggcaaaattcagaacaagctgactgacctggagatacttgcattgctgattgctgcactaagccacgatttggatcaccgtggtgtgaataactcttacatacagcgaagtgaacatccacttgcccagctttactgccattcaatcatggaacaccatcattttgaccagtgcctgatgattcttaatagtccaggcaatcagattctcagtggcctctccattgaagaatataagaccacgttgaaaataatcaagcaagctattttagctacagacctagcactgtacattaagaggctaggagaatttgctgaacttataagaaaaaatcaattcaatttggaagatcctcatcaaaaggagttgtttttggcaatgctgatgacagcttgtgatctttctgcaattacaaaaccctggcctattcaacaacggatagcagaacttgtagcaactgaattttttgatcaaggagacagagagagaaaagaactcaacatagaacccactgatctaatgaacagggagaagaaaaacaaaatcccaagtatgcaagttgggttcatagatgccatctgcttgcaactgtatgaggccctgacccacgtgtcagaggactgtttccctttgctagatggctgcagaaagaacaggcagaaatggcaggcccttgcagaacagcagggatccagagtgaagttcagcaggagcgcagacgcccccgcgtacaagcagggccagaaccagctctataacgagctcaatctaggacgaagagaggagtacgatgttttggacaagagacgtggccgggaccctgagatggggggaaagccgagaaggaagaaccctcaggaaggcctgtacaatgaactgcagaaagataagatggcggaggcctacagtgagattgggatgaaaggcgagcgccggaggggcaaggggcacgatggcctttaccagggtctcagtacagccaccaaggacacctacgacgcccttcacatgcaggccctgccccctcgctaa

SEQ ID NO: 8995 - DNA, 2250 bp, Artificial Sequence
  source: /note="Description of Artificial Sequence: Synthetic polynucleotide"
atggccttaccagtgaccgccttgctcctgccgctggccttgctgctccacgccgccaggccggacatccagatgacacagactacatcctccctgtctgcctctctgggagacagagtcaccatcagttgcagggcaagtcaggacattagtaaatatttaaattggtatcagcagaaaccagatggaactgttaaactcctgatctaccatacatcaagattacactcaggagtcccatcaaggttcagtggcagtgggtctggaacagattattctctcaccattagcaacctggagcaagaagatattgccacttacttttgccaacagggtaatacgcttccgtacacgttcggaggggggaccaagctggagatcacaggtggcggtggctcgggcggtggtgggtcgggtggcggcggatctgaggtgaaactgcaggagtcaggacctggcctggtggcgccctcacagagcctgtccgtcacatgcactgtctcaggggtctcattacccgactatggtgtaagctggattcgccagcctccacgaaagggtctggagtggctgggagtaatatggggtagtgaaaccacatactataattcagctctcaaatccagactgaccatcatcaaggacaactccaagagccaagttttcttaaaaatgaacagtctgcaaactgatgacacagccatttactactgtgccaaacattattactacggtggtagctatgctatggactactggggccaaggaacctcagtcaccgtctcctcaaccacgacgccagcgccgcgaccaccaacaccggcgcccaccatcgcgtcgcagcccctgtccctgcgcccagaggcgtgccggccagcggcggggggcgcagtgcacacgagggggctggacttcgcctgtgatatctacatctgggcgcccttggccgggacttgtggggtccttctcctgtcactggttatcaccctttactgcaaacggggcagaaagaaactcctgtatatattcaaacaaccatttatgagaccagtacaaactactcaagaggaagatggctgtagctgccgatttccagaagaagaagaaggaggatgtgaactgagagtgaagttcagcaggagcgcagacgcccccgcgtacaagcagggccagaaccagctctataacgagctcaatctaggacgaagagaggagtacgatgttttggacaagagacgtggccgggaccctgagatggggggaaagccgagaaggaagaaccctcaggaaggcctgtacaatgaactgcagaaagataagatggcggaggcctacagtgagattgggatgaaaggcgagcgccggaggggcaaggggcacgatggcctttaccagggtctcagtacagccaccaaggacacctacgacgcccttcacatgcaggccctgccccctcgcggatcaggagctactaacttcagcctgctgaagcaggctggagacgtggaggagaaccctggacctggatccggtgtgagcaagggcgaggagctgttcaccggggtggtgcccatcctggtcgagctggacggcgacgtaaacggccacaagttcagcgtgtccggcgagggcgagggcgatgccacctacggcaagctgaccctgaagttcatctgcaccaccggcaagctgcccgtgccctggcccaccctcgtgaccaccctgacctacggcgtgcagtgcttcagccgctaccccgaccacatgaagcagcacgacttcttcaagtccgccatgcccgaaggctacgtccaggagcgcaccatcttcttcaaggacgacggcaactacaagacccgcgccgaggtgaagttcgagggcgacaccctggtgaaccgcatcgagctgaagggcatcgacttcaaggaggacggcaacatcctggggcacaagctggagtacaactacaacagccacaacgtctatatcatggccgacaagcagaagaacggcatcaaggtgaacttcaagatccgccacaacatcgaggacggcagcgtgcagctcgccgaccactaccagcagaacacccccatcggcgacggccccgtgctgctgcccgacaaccactacctgagcacccagtccgccctgagcaaagaccccaacgagaagcgcgatcacatggtcctgctggagttcgtgaccgccgccgggatcactctcggcatggacgagctgtacaagtaa

SEQ ID NO: 8996 - DNA, 3177 bp, Artificial Sequence
  source: /note="Description of Artificial Sequence: Synthetic polynucleotide"
atggccttaccagtgaccgccttgctcctgccgctggccttgctgctccacgccgccaggccggacatccagatgacacagactacatcctccctgtctgcctctctgggagacagagtcaccatcagttgcagggcaagtcaggacattagtaaatatttaaattggtatcagcagaaaccagatggaactgttaaactcctgatctaccatacatcaagattacactcaggagtcccatcaaggttcagtggcagtgggtctggaacagattattctctcaccattagcaacctggagcaagaagatattgccacttacttttgccaacagggtaatacgcttccgtacacgttcggaggggggaccaagctggagatcacaggtggcggtggctcgggcggtggtgggtcgggtggcggcggatctgaggtgaaactgcaggagtcaggacctggcctggtggcgccctcacagagcctgtccgtcacatgcactgtctcaggggtctcattacccgactatggtgtaagctggattcgccagcctccacgaaagggtctggagtggctgggagtaatatggggtagtgaaaccacatactataattcagctctcaaatccagactgaccatcatcaaggacaactccaagagccaagttttcttaaaaatgaacagtctgcaaactgatgacacagccatttactactgtgccaaacattattactacggtggtagctatgctatggactactggggccaaggaacctcagtcaccgtctcctcaaccacgacgccagcgccgcgaccaccaacaccggcgcccaccatcgcgtcgcagcccctgtccctgcgcccagaggcgtgccggccagcggcggggggcgcagtgcacacgagggggctggacttcgcctgtgatatctacatctgggcgcccttggccgggacttgtggggtccttctcctgtcactggttatcaccctttactgcaaacggggcagaaagaaactcctgtatatattcaaacaaccatttatgagaccagtacaaactactcaagaggaagatggctgtagctgccgatttccagaagaagaagaaggaggatgtgaactgagagtgaagttcagcaggagcgcagacgcccccgcgtacaagcagggccagaaccagctctataacgagctcaatctaggacgaagagaggagtacgatgttttggacaagagacgtggccgggaccctgagatggggggaaagccgagaaggaagaaccctcaggaaggcctgtacaatgaactgcagaaagataagatggcggaggcctacagtgagattgggatgaaaggcgagcgccggaggggcaaggggcacgatggcctttaccagggtctcagtacagccaccaaggacacctacgacgcccttcacatgcaggccctgccccctcgcggatccggtgctactaacttcagcctgctgaagcaggctggagacgtggaggagaaccctggacctatggaagatgccaaaaacattaagaagggcccagcgccattctacccactcgaagacgggaccgccggcgagcagctgcacaaagccatgaagcgctacgccctggtgcccggcaccatcgcctttaccgacgcacatatcgaggtggacattacctacgccgagtacttcgagatgagcgttcggctggcagaagctatgaagcgctatgggctgaatacaaaccatcggatcgtggtgtgcagcgagaatagcttgcagttcttcatgcccgtgttgggtgccctgttcatcggtgtggctgtggccccagctaacgacatctacaacgagcgcgagctgctgaacagcatgggcatcagccagcccaccgtcgtattcgtgagcaagaaagggctgcaaaagatcctcaacgtgcaaaagaagctaccgatcatacaaaagatcatcatcatggatagcaagaccgactaccagggcttccaaagcatgtacaccttcgtgacttcccatttgccacccggcttcaacgagtacgacttcgtgcccgagagcttcgaccgggacaaaaccatcgccctgatcatgaacagtagtggcagtaccggattgcccaagggcgtagccctaccgcaccgcaccgcttgtgtccgattcagtcatgcccgcgaccccatcttcggcaaccagatcatccccgacaccgctatcctcagcgtggtgccatttcaccacggcttcggcatgttcaccacgctgggctacttgatctgcggctttcgggtcgtgctcatgtaccgcttcgaggaggagctattcttgcgcagcttgcaagactataagattcaatctgccctgctggtgcccacactatttagcttcttcgctaagagcactctcatcgacaagtacgacctaagcaacttgcacgagatcgccagcggcggggcgccgctcagcaaggaggtaggtgaggccgtggccaaacgcttccacctaccaggcatccgccagggctacggcctgacagaaacaaccagcgccattctgatcacccccgaaggggacgacaagcctggcgcagtaggcaaggtggtgcccttcttcgaggctaaggtggtggacttggacaccggtaagacactgggtgtgaaccagcgcggcgagctgtgcgtccgtggccccatgatcatgagcggctacgttaacaaccccgaggctacaaacgctctcatcgacaaggacggctggctgcacagcggcgacatcgcctactgggacgaggacgagcacttcttcatcgtggaccggctgaagagcctgatcaaatacaagggctaccaggtagccccagccgaactggagagcatcctgctgcaacaccccaacatcttcgacgccggggtcgccggcctgcccgacgacgatgccggcgagctgcccgccgcagtcgtcgtgctggaacacggtaaaaccatgaccgagaaggagatcgtggactatgtggccagccaggttacaaccgccaagaagctgcgcggtggtgttgtgttcgtggacgaggtgcctaaaggactgaccggcaagttggacgcccgcaagatccgcgagattctcattaaggccaagaagggcggcaagatcgccgtgtga

SEQ ID NO: 8997 - DNA, 2472 bp, Artificial Sequence
  source: /note="Description of Artificial Sequence: Synthetic polynucleotide"
atggcactgcctgtgaccgccctgctgctgccactggccctgctgctgcacgcagccaggccctatccttacgatgtgcccgactatgctgacatccagatgacacagaccacaagctccctgtccgcctctctgggcgacagagtgaccatcagctgccgggcctcccaggatatctctaagtatctgaactggtaccagcagaagcccgatggcacagtgaagctgctgatctatcacaccagccgcctgcactccggagtgccttctaggttcagcggctccggctctggcacagactacagcctgaccatctccaacctggagcaggaggatatcgccacctatttctgccagcagggcaatacactgccttacacctttggcggcggcacaaagctggagatcaccggaggaggaggcagcggaggaggaggctccggcggcggcggctctgaggtgaagctgcaggagtccggaccaggcctggtggcacctagccagtccctgtctgtgacatgtaccgtgtccggcgtgtctctgccagactacggcgtgtcttggatcaggcagccacctaggaagggcctggagtggctgggcgtgatctggggcagcgagacaacatactataattctgccctgaagagcagactgacaatcatcaaggacaacagcaagtcccaggtgttcctgaagatgaatagcctgcagacagacgataccgccatctactattgcgccaagcactactattacggcggcagctatgccatggattactggggccagggcacatccgtgaccgtgtctagcaccacaaccccagcacctcgcccaccaacaccagcaccaaccatcgcatcccagccactgtctctgaggcccgaggcatgtaggcctgcagcaggaggcgccgtgcacaccaggggcctggactttgcctgcgatatctatatctgggcaccactggcaggaacatgtggcgtgctgctgctgtccctggtcatcaccctgtattgcaagagaggccggaagaagctgctgtacatcttcaagcagcccttcatgaggcccgtgcagacaacccaggaggaggacggctgcagctgtcggttcccagaggaggaggagggaggatgtgagctgagggtgaagttttctaggagcgccgatgcaccagcatataagcagggacagaaccagctgtacaacgagctgaatctgggcaggagagaggagtacgacgtgctggataagaggaggggaagggaccccgagatgggaggcaagccaaggagaaagaacccccaggagggcctgtataatgagctgcagaaggacaagatggccgaggcctactccgagatcggcatgaagggagagcggcgcaggggcaagggacacgatggcctgtatcagggcctgtctacagccaccaaggacacctacgatgcactgcacatgcaggccctgcctccaaggtcaggtgaagaaacaagagagctacagtcgttagcggctgctgtggtgccatctgcccagacccttaaaattactgactttagcttcagtgactttgagctgtctgatctggaaacagcactgtgtacaattcggatgtttactgacctcaaccttgtgcagaacttccagatgaaacatgaggttctttgcagatggattttaagtgttaagaagaattatcggaagaatgttgcctatcataattggagacatgcctttaatacagctcagtgcatgtttgctgccctaaaagcaggcaaaattcagaacaagctgactgacctggagatacttgcattgctgattgctgcactaagccacgatttggatcaccgtggtgtgaataactcttacatacagcgaagtgaacatccacttgcccagctttactgccattcaatcatggaacaccatcattttgaccagtgcctgatgattcttaatagtccaggcaatcagattctcagtggcctctccattgaagaatataagaccacgttgaaaataatcaagcaagctattttagctacagacctagcactgtacattaagaggcgaggagaattttttgaacttataagaaaaaatcaattcaatttggaagatcctcatcaaaaggagttgtttttggcaacgctgatgacagcttgtgatctttctgcaattacaaaaccctggcctattcaacaacgaatagcagaacttgtagcaactgaattttttgatcaaggagacagagagagaaaagaactcaacatagaacccactgatctaatgaacagggagaagaaaaacaaaatcccaagtatgcaagttgggttcatagatgccatctgcttgcaactgtatgaggccctgacccacgtgtcagaggactgtttccctttgctagatggctgcagaaagaacaggcagaaatggcaggcccttgcagaacagcagtag

SEQ ID NO: 8998 - DNA, 2472 bp, Artificial Sequence
  source: /note="Description of Artificial Sequence: Synthetic polynucleotide"
atggcactgcctgtgaccgccctgctgctgccactggccctgctgctgcacgcagccaggccctatccttacgatgtgcccgactatgctgacatccagatgacacagaccacaagctccctgtccgcctctctgggcgacagagtgaccatcagctgccgggcctcccaggatatctctaagtatctgaactggtaccagcagaagcccgatggcacagtgaagctgctgatctatcacaccagccgcctgcactccggagtgccttctaggttcagcggctccggctctggcacagactacagcctgaccatctccaacctggagcaggaggatatcgccacctatttctgccagcagggcaatacactgccttacacctttggcggcggcacaaagctggagatcaccggaggaggaggcagcggaggaggaggctccggcggcggcggctctgaggtgaagctgcaggagtccggaccaggcctggtggcacctagccagtccctgtctgtgacatgtaccgtgtccggcgtgtctctgccagactacggcgtgtcttggatcaggcagccacctaggaagggcctggagtggctgggcgtgatctggggcagcgagacaacatactataattctgccctgaagagcagactgacaatcatcaaggacaacagcaagtcccaggtgttcctgaagatgaatagcctgcagacagacgataccgccatctactattgcgccaagcactactattacggcggcagctatgccatggattactggggccagggcacatccgtgaccgtgtctagcaccacaaccccagcacctcgcccaccaacaccagcaccaaccatcgcatcccagccactgtctctgaggcccgaggcatgtaggcctgcagcaggaggcgccgtgcacaccaggggcctggactttgcctgcgatatctatatctgggcaccactggcaggaacatgtggcgtgctgctgctgtccctggtcatcaccctgtattgcaagagaggccggaagaagctgctgtacatcttcaagcagcccttcatgaggcccgtgcagacaacccaggaggaggacggctgcagctgtcggttcccagaggaggaggagggaggatgtgagctgagggtgaagttttctaggagcgccgatgcaccagcatataagcagggacagaaccagctgtacaacgagctgaatctgggcaggagagaggagtacgacgtgctggataagaggaggggaagggaccccgagatgggaggcaagccaaggagaaagaacccccaggagggcctgtataatgagctgcagaaggacaagatggccgaggcctactccgagatcggcatgaagggagagcggcgcaggggcaagggacacgatggcctgtatcagggcctgtctacagccaccaaggacacctacgatgcactgcacatgcaggccctgcctccaaggtcaggtgaagaaacaagagagctacagtcgttagcggctgctgtggtgccatctgcccagacccttaaaattactgactttagcttcagtgactttgagctgtctgatctggaaacagcactgtgtacaattcggatgtttactgacctcaaccttgtgcagaacttccagatgaaacatgaggttctttgcagatggattttaagtgttaagaagaattatcggaagaatgttgcctatcataattggagacatgcctttaatacagctcagtgcatgtttgctgctctaaaagcaggcaaaattcagaacaagctgactgacctggagatacttgcattgctgattgctgcactaagccacgatttggatcaccgtggtgtgaataactcttacatacagcgaagtgaacatccacttgcccagctttactgccattcaatcatggaacaccatcattttgaccagtgcctgatgattcttaatagtccaggcaatcagattctcagtggcctctccattgaagaatataagaccacgttgaaaataatcaagcaagctattttagctacagacctagcactgtacattaagaggcgaggagaattttttgaacttataagaaaaaatcaattcaatttggaagatcctcatcaagaggagttgtttttggcaatgctgatgacagcttgtgatctttctgcaattacaaaaccctggcctattcaacaacggatagcagaacttgtagcaactgaattttttgatcaaggagacagagagagaaaagaactcaacatagaacccactgatctaatgaacagggagaagaaaaacaaaatcccgagtatgcaagttgggttcatagatgccatctgcttgcaactgtatgaggccctgacccacgtgtcagaggactgtttccctttgctagatggctgcagaaagaacaggcagaaatggcaggcccttgcagaacagcagtag

SEQ ID NO: 8999 - DNA, 2472 bp, Artificial Sequence
  source: /note="Description of Artificial Sequence: Synthetic polynucleotide"
atggcactgcctgtgaccgccctgctgctgccactggccctgctgctgcacgcagccaggccctatccttacgatgtgcccgactatgctgacatccagatgacacagaccacaagctccctgtccgcctctctgggcgacagagtgaccatcagctgccgggcctcccaggatatctctaagtatctgaactggtaccagcagaagcccgatggcacagtgaagctgctgatctatcacaccagccgcctgcactccggagtgccttctaggttcagcggctccggctctggcacagactacagcctgaccatctccaacctggagcaggaggatatcgccacctatttctgccagcagggcaatacactgccttacacctttggcggcggcacaaagctggagatcaccggaggaggaggcagcggaggaggaggctccggcggcggcggctctgaggtgaagctgcaggagtccggaccaggcctggtggcacctagccagtccctgtctgtgacatgtaccgtgtccggcgtgtctctgccagactacggcgtgtcttggatcaggcagccacctaggaagggcctggagtggctgggcgtgatctggggcagcgagacaacatactataattctgccctgaagagcagactgacaatcatcaaggacaacagcaagtcccaggtgttcctgaagatgaatagcctgcagacagacgataccgccatctactattgcgccaagcactactattacggcggcagctatgccatggattactggggccagggcacatccgtgaccgtgtctagcaccacaaccccagcacctcgcccaccaacaccagcaccaaccatcgcatcccagccactgtctctgaggcccgaggcatgtaggcctgcagcaggaggcgccgtgcacaccaggggcctggactttgcctgcgatatctatatctgggcaccactggcaggaacatgtggcgtgctgctgctgtccctggtcatcaccctgtattgcaagagaggccggaagaagctgctgtacatcttcaagcagcccttcatgaggcccgtgcagacaacccaggaggaggacggctgcagctgtcggttcccagaggaggaggagggaggatgtgagctgagggtgaagttttctaggagcgccgatgcaccagcatataagcagggacagaaccagctgtacaacgagctgaatctgggcaggagagaggagtacgacgtgctggataagaggaggggaagggaccccgagatgggaggcaagccaaggagaaagaacccccaggagggcctgtataatgagctgcagaaggacaagatggccgaggcctactccgagatcggcatgaagggagagcggcgcaggggcaagggacacgatggcctgtatcagggcctgtctacagccaccaaggacacctacgatgcactgcacatgcaggccctgcctccaaggtcaggtgaagaaacaagagagctacagtcgttagcggctgctgtggtgccatctgcccagacccttaaaattactgactttagcttcagtgactttgagctgtctgatctggaaacagcattgtgtacaattcggatgtttactgacctcaaccttgtgcagaacttccagatgaaacatgaggttctttgcagatggattttaagtgttaagaagaattatcggaagaatgttgcctatcataattggagacatgcctttaatacagctcagtgcatgtttgctgctctaaaagcaggcaaaattcagaacaagctgactgacctggagatacttgcattgttgattgctgcactaagccacgatttggatcaccgtggtgtgaataactcttacatacagcgaagtgaacatccacttgcccagctttactaccattcaatcatggaacaccatcgttttgaccagtgcctgatgattcttaatagtccaggcaatcagattctcagtggcctctccattgaagaatataagaccacgttgaaaataatcaagcaagctattttagttacagacctagcactgtacattaagaggcgaggagaattttttgaacttataagaaaaaatcaattcaatttggaagatcctcatcaaaaggagttgtttttggcaatgctgatgacagcttgtgatctttctgcaattacaaaaccctggcctattcaacaacggatagcagaacttgtagcaactgaattttttgatcaaggagacagagagagaaaagaactcaacatagaacccactgatctaatgaacagggagaagaaaaacaaaatcccaagtatgcaagttgggttcatagatgccatctgcttgcaactgtatgaggccctgacccacgtgtcagaggactgtttccctttgctagatggctgcagaaagaacaggcagaaatggcaggcccttgcagaacagcagtag

SEQ ID NO: 9000 - DNA, 2472 bp, Artificial Sequence
  source: /note="Description of Artificial Sequence: Synthetic polynucleotide"
atggcactgcctgtgaccgccctgctgctgccactggccctgctgctgcacgcagccaggccctatccttacgatgtgcccgactatgctgacatccagatgacacagaccacaagctccctgtccgcctctctgggcgacagagtgaccatcagctgccgggcctcccaggatatctctaagtatctgaactggtaccagcagaagcccgatggcacagtgaagctgctgatctatcacaccagccgcctgcactccggagtgccttctaggttcagcggctccggctctggcacagactacagcctgaccatctccaacctggagcaggaggatatcgccacctatttctgccagcagggcaatacactgccttacacctttggcggcggcacaaagctggagatcaccggaggaggaggcagcggaggaggaggctccggcggcggcggctctgaggtgaagctgcaggagtccggaccaggcctggtggcacctagccagtccctgtctgtgacatgtaccgtgtccggcgtgtctctgccagactacggcgtgtcttggatcaggcagccacctaggaagggcctggagtggctgggcgtgatctggggcagcgagacaacatactataattctgccctgaagagcagactgacaatcatcaaggacaacagcaagtcccaggtgttcctgaagatgaatagcctgcagacagacgataccgccatctactattgcgccaagcactactattacggcggcagctatgccatggattactggggccagggcacatccgtgaccgtgtctagcaccacaaccccagcacctcgcccaccaacaccagcaccaaccatcgcatcccagccactgtctctgaggcccgaggcatgtaggcctgcagcaggaggcgccgtgcacaccaggggcctggactttgcctgcgatatctatatctgggcaccactggcaggaacatgtggcgtgctgctgctgtccctggtcatcaccctgtattgcaagagaggccggaagaagctgctgtacatcttcaagcagcccttcatgaggcccgtgcagacaacccaggaggaggacggctgcagctgtcggttcccagaggaggaggagggaggatgtgagctgagggtgaagttttctaggagcgccgatgcaccagcatataagcagggacagaaccagctgtacaacgagctgaatctgggcaggagagaggagtacgacgtgctggataagaggaggggaagggaccccgagatgggaggcaagccaaggagaaagaacccccaggagggcctgtataatgagctgcagaaggacaagatggccgaggcctactccgagatcggcatgaagggagagcggcgcaggggcaagggacacgatggcctgtatcagggcctgtctacagccaccaaggacacctacgatgcactgcacatgcaggccctgcctccaaggtcaggtgaagaaacaagagagctacagtcgttagcggctgctgtggtgccatctgcccagacccttaaaattactgactttagcttcagtgactttgagctgtctgatctggaaacagcactgtgtacaattcggatgtttactgacctcaaccttgtgcagaacttccagatgaaacatgaggttctttgcagatggattttaagtgttaagaagaattatcggaagaatgttgcctatcataattggagacatgcctttaatacagctcagtgcatgtttgctgctctaaaagcaggcaaaattcagaacaagctgtctgacctggagatacttgcattgctgattgctgcactaagccacgatttggatcaccgtggtgtgaataactcttacatacagcgaagtgaacatccacttgcccagctttactgccattcaatcatggaacaccatcattttgaccagtgcctgatgatccttaatagtccaggcaatcagattctcagtggcctctccattgaagaatataagaccacgttgaaaataatcaagcaagctattttagctacagacctagcgctgtacattaagaggcgaggagaattttttgaacttataagaaaaaatcaattcaatttggaagatcctcatcagaaggagttgtttttggcaatgctgatgacagcttgtgatctttctgcaattacaaaaccctggcctattcaacaacggatagcagaacttgtagcaactgaattttttgatcaaggagacagagagagaaaagaactcaacatagaacccactgatctaatgaacagggagaagaaaaacaaaatcccaagtaggcaagttgggttcatagatgccatctgcttgcaactgtatgaggccctgacccacgtgtcagaggactgtttccctttgctagatggctgcagaaagaacaggcagaaatggcaggcccttgcagaacagcagtag

SEQ ID NO: 9001 - DNA, 2472 bp, Artificial Sequence
  source: /note="Description of Artificial Sequence: Synthetic polynucleotide"
atggcactgcctgtgaccgccctgctgctgccactggccctgctgctgcacgcagccaggccctatccttacgatgtgcccgactatgctgacatccagatgacacagaccacaagctccctgtccgcctctctgggcgacagagtgaccatcagctgccgggcctcccaggatatctctaagtatctgaactggtaccagcagaagcccgatggcacagtgaagctgctgatctatcacaccagccgcctgcactccggagtgccttctaggttcagcggctccggctctggcacagactacagcctgaccatctccaacctggagcaggaggatatcgccacctatttctgccagcagggcaatacactgccttacacctttggcggcggcacaaagctggagatcaccggaggaggaggcagcggaggaggaggctccggcggcggcggctctgaggtgaagctgcaggagtccggaccaggcctggtggcacctagccagtccctgtctgtgacatgtaccgtgtccggcgtgtctctgccagactacggcgtgtcttggatcaggcagccacctaggaagggcctggagtggctgggcgtgatctggggcagcgagacaacatactataattctgccctgaagagcagactgacaatcatcaaggacaacagcaagtcccaggtgttcctgaagatgaatagcctgcagacagacgataccgccatctactattgcgccaagcactactattacggcggcagctatgccatggattactggggccagggcacatccgtgaccgtgtctagcaccacaaccccagcacctcgcccaccaacaccagcaccaaccatcgcatcccagccactgtctctgaggcccgaggcatgtaggcctgcagcaggaggcgccgtgcacaccaggggcctggactttgcctgcgatatctatatctgggcaccactggcaggaacatgtggcgtgctgctgctgtccctggtcatcaccctgtattgcaagagaggccggaagaagctgctgtacatcttcaagcagcccttcatgaggcccgtgcagacaacccaggaggaggacggctgcagctgtcggttcccagaggaggaggagggaggatgtgagctgagggtgaagttttctaggagcgccgatgcaccagcatataagcagggacagaaccagctgtacaacgagctgaatctgggcaggagagaggagtacgacgtgctggataagaggaggggaagggaccccgagatgggaggcaagccaaggagaaagaacccccaggagggcctgtataatgagctgcagaaggacaagatggccgaggcctactccgagatcggcatgaagggagagcggcgcaggggcaagggacacgatggcctgtatcagggcctgtctacagccaccaaggacacctacgatgcactgcacatgcaggccctgcctccaaggtcaggtgaagaagcaagagagctacagtcgttagcggctgctgtggtgccatctgcccagacccttaaaattactggctttagcttcagtgactttgagctgtctgatctggaaacagcactgtgtacaattcggatgtttactgacctcaaccttgtgcagaacttccagatgaaacatgaggttctttgcagatggattttaagtgttaagaagaattatcggaagaatgttgcctatcataattggagacatgcctttaatacagctcagtgcatgtttgctgctctaaaagcaggcaaaattcagaacaagctgactgacctggagatacttgcattgctgattgctgcactaagccacgatttggatcaccgtggtgtgaataactcttacatacagcgaagtgaacatccacttgcccagctttactgccattcaatcatggaacaccatcattttgaccagtgcctgatgattcttaatagtccaggcaatcagattctcagtggcctctccactgaagaatataagaccacgttgaaaataatcaagcaagctattttagctacagacctagcactgtacattaagaggcgaggagaattttttgaacttataagaaaaaatcaactcaatttggaagatcctcatcaaaaggagttgtttttggcaatgctgatgacagcttgcaatctttctgcaattacaaaaccctggcctattcaacaacggatagcagaacttgtagcaactgaattttttgatcaaggagacagagagagaaaagaactcaacatagaacccactgatctaatgaacagggagaagaaaaacaaaatcccaagtatgcaagttgggttcatagatgccatctgcttgcagctgtatgaggccctgacccacgtgtcagaggactgtttccctttgctagatggctgcagaaagaacaggcagaaatggcaggcccttgcagaacagcagtag

SEQ ID NO: 9002 - DNA, 2472 bp, Artificial Sequence
  source: /note="Description of Artificial Sequence: Synthetic polynucleotide"
atggcactgcctgtgaccgccctgctgctgccactggccctgctgctgcacgcagccaggccctatccttacgatgtgcccgactatgctgacatccagatgacacagaccacaagctccctgtccgcctctctgggcgacagagtgaccatcagctgccgggcctcccaggatatctctaagtatctgaactggtaccagcagaagcccgatggcacagtgaagctgctgatctatcacaccagccgcctgcactccggagtgccttctaggttcagcggctccggctctggcacagactacagcctgaccatctccaacctggagcaggaggatatcgccacctatttctgccagcagggcaatacactgccttacacctttggcggcggcacaaagctggagatcaccggaggaggaggcagcggaggaggaggctccggcggcggcggctctgaggtgaagctgcaggagtccggaccaggcctggtggcacctagccagtccctgtctgtgacatgtaccgtgtccggcgtgtctctgccagactacggcgtgtcttggatcaggcagccacctaggaagggcctggagtggctgggcgtgatctggggcagcgagacaacatactataattctgccctgaagagcagactgacaatcatcaaggacaacagcaagtcccaggtgttcctgaagatgaatagcctgcagacagacgataccgccatctactattgcgccaagcactactattacggcggcagctatgccatggattactggggccagggcacatccgtgaccgtgtctagcaccacaaccccagcacctcgcccaccaacaccagcaccaaccatcgcatcccagccactgtctctgaggcccgaggcatgtaggcctgcagcaggaggcgccgtgcacaccaggggcctggactttgcctgcgatatctatatctgggcaccactggcaggaacatgtggcgtgctgctgctgtccctggtcatcaccctgtattgcaagagaggccggaagaagctgctgtacatcttcaagcagcccttcatgaggcccgtgcagacaacccaggaggaggacggctgcagctgtcggttcccagaggaggaggagggaggatgtgagctgagggtgaagttttctaggagcgccgatgcaccagcatataagcagggacagaaccagctgtacaacgagctgaatctgggcaggagagaggagtacgacgtgctggataagaggaggggaagggaccccgagatgggaggcaagccaaggagaaagaacccccaggagggcctgtataatgagctgcagaaggacaagatggccgaggcctactccgagatcggcatgaagggagagcggcgcaggggcaagggacacgatggcctgtatcagggcctgtctacagccaccaaggacacctacgatgcactgcacatgcaggccctgcctccaaggtcaggtgaagaaacaagagagctacagtcgttagcggctgctgtggtgccatctgcccagacccttaaaattactgactttagcttcagtgactttgagctgtctgatctggaaacagcactgtgtacaattcggatgtttactgacctcaaccttgtgcggaacttccagatgaaacatgaggttctttgcagatggattttaagtgttaagaagaattatcggaagaatgttgcctatcataattggagacatgcctttaatacagctcagtgcatgtttgctgctctaaaagcaggcaaaattcagaacaagctgactgacctggagatacttgcattgctgattgctgcactaagccacgatttggatcaccgtggtgtgaataactcttacatacagcgaagtgaacatccacttgcccagctttactgccattcaatcatggaacaccatcattttgaccagtgcctgatgattcttaatagtccaggcaatcagattctcagtggcctctccattgaagaatataagaccacgttgaaaataatcaagcaagctattttagctacaggcctagcactgtacattaagaggcgaggagaattttttgaacttataagaaaaaatcaattcaatttggaagatcctcatcaaaaggagttgtttttggcaatgctgatgacagcttgtgatctttctgcaattacaaaaccctggcctattcaacaacggatagcagaacttgtagcaactgaattttttgatcaaggagacagagagagaaaagaactcaacatagaacccactgatctaatgaacagggagaagaaaaacaaaatcccaagtatgcaagttgggttcatagatgccatctgcttgcaactgtatgaggccctgacccacgtgtcagaggactgtttccctttgctggatggctgcagaaagaacaggcagaaatggcaggcccttgcagaacagcagtag

SEQ ID NO: 9003 - DNA, 2472 bp, Artificial Sequence
  source: /note="Description of Artificial Sequence: Synthetic polynucleotide"
atggcactgcctgtgaccgccctgctgctgccactggccctgctgctgcacgcagccaggccctatccttacgatgtgcccgactatgctgacatccagatgacacagaccacaagctccctgtccgcctctctgggcgacagagtgaccatcagctgccgggcctcccaggatatctctaagtatctgaactggtaccagcagaagcccgatggcacagtgaagctgctgatctatcacaccagccgcctgcactccggagtgccttctaggttcagcggctccggctctggcacagactacagcctgaccatctccaacctggagcaggaggatatcgccacctatttctgccagcagggcaatacactgccttacacctttggcggcggcacaaagctggagatcaccggaggaggaggcagcggaggaggaggctccggcggcggcggctctgaggtgaagctgcaggagtccggaccaggcctggtggcacctagccagtccctgtctgtgacatgtaccgtgtccggcgtgtctctgccagactacggcgtgtcttggatcaggcagccacctaggaagggcctggagtggctgggcgtgatctggggcagcgagacaacatactataattctgccctgaagagcagactgacaatcatcaaggacaacagcaagtcccaggtgttcctgaagatgaatagcctgcagacagacgataccgccatctactattgcgccaagcactactattacggcggcagctatgccatggattactggggccagggcacatccgtgaccgtgtctagcaccacaaccccagcacctcgcccaccaacaccagcaccaaccatcgcatcccagccactgtctctgaggcccgaggcatgtaggcctgcagcaggaggcgccgtgcacaccaggggcctggactttgcctgcgatatctatatctgggcaccactggcaggaacatgtggcgtgctgctgctgtccctggtcatcaccctgtattgcaagagaggccggaagaagctgctgtacatcttcaagcagcccttcatgaggcccgtgcagacaacccaggaggaggacggctgcagctgtcggttcccagaggaggaggagggaggatgtgagctgagggtgaagttttctaggagcgccgatgcaccagcatataagcagggacagaaccagctgtacaacgagctgaatctgggcaggagagaggagtacgacgtgctggataagaggaggggaagggaccccgagatgggaggcaagccaaggagaaagaacccccaggagggcctgtataatgagctgcagaaggacaagatggccgaggcctactccgagatcggcatgaagggagagcggcgcaggggcaagggacacgatggcctgtatcagggcctgtctacagccaccaaggacacctacgatgcactgcacatgcaggccctgcctccaaggtcaggtgaagaaacaagagagctacagtcgttagcggctgctgtggtgccatctgcccagacccttaaaattactgactttagcttcagtgactttgagctgtctgatctggaaacagcactgtgtacaattcggatgtttactgacctcaaccttgtgcagaacttccagatgaaacatgaggttctttgcagatggattttaagtgttaagaagaattatcggaagaatgttgcctatcataattggagacatgcctttaatacagctcagtgcatgtttgctgctctaaaagcaggcaaaattcagaacaagctgactgacctggagatacttgcattgctgattgctgcactaagccacgatttggatcaccgtggtgtgaataactcttacatacagcgaagtgaacatccacttgcccagctttactgccattcaatcatggaacaccatcattctgaccagtgcctgatgattcttaatagtccaggcaatcagattctcagtggcctctccattgaagaatataagaccacgttgaaaataatcaagcaagctattttagctacagacctagcactgtacattaagaggcgaggagaattttttgaacttataagaaaaaatcaattcaatttggaagatcctcatcaaaaggagttgtttttggcaatgctgatgacagcttgtgatctttctgcaattacaaaaccctggcctattcaacaacggatagcagaacttgtagcaactgaattttttgatcaaggagacagagagagaaaagaactcaacatagaacccactgatctaatgaacagggagaagaaaaacaaaatcccaagtatgcaagttgggttcatagatgccatctgcttgcaactgtatgaggccctgacccacgtgtcagaggactgtttccctttgctagatggctgcagaaagaacaggcagaaatggcaggcccttgcagaacagcagtag

SEQ ID NO: 9004 - DNA, 2472 bp, Artificial Sequence
  source: /note="Description of Artificial Sequence: Synthetic polynucleotide"
atggcactgcctgtgaccgccctgctgctgccactggccctgctgctgcacgcagccaggccctatccttacgatgtgcccgactatgctgacatccagatgacacagaccacaagctccctgtccgcctctctgggcgacagagtgaccatcagctgccgggcctcccaggatatctctaagtatctgaactggtaccagcagaagcccgatggcacagtgaagctgctgatctatcacaccagccgcctgcactccggagtgccttctaggttcagcggctccggctctggcacagactacagcctgaccatctccaacctggagcaggaggatatcgccacctatttctgccagcagggcaatacactgccttacacctttggcggcggcacaaagctggagatcaccggaggaggaggcagcggaggaggaggctccggcggcggcggctctgaggtgaagctgcaggagtccggaccaggcctggtggcacctagccagtccctgtctgtgacatgtaccgtgtccggcgtgtctctgccagactacggcgtgtcttggatcaggcagccacctaggaagggcctggagtggctgggcgtgatctggggcagcgagacaacatactataattctgccctgaagagcagactgacaatcatcaaggacaacagcaagtcccaggtgttcctgaagatgaatagcctgcagacagacgataccgccatctactattgcgccaagcactactattacggcggcagctatgccatggattactggggccagggcacatccgtgaccgtgtctagcaccacaaccccagcacctcgcccaccaacaccagcaccaaccatcgcatcccagccactgtctctgaggcccgaggcatgtaggcctgcagcaggaggcgccgtgcacaccaggggcctggactttgcctgcgatatctatatctgggcaccactggcaggaacatgtggcgtgctgctgctgtccctggtcatcaccctgtattgcaagagaggccggaagaagctgctgtacatcttcaagcagcccttcatgaggcccgtgcagacaacccaggaggaggacggctgcagctgtcggttcccagaggaggaggagggaggatgtgagctgagggtgaagttttctaggagcgccgatgcaccagcatataagcagggacagaaccagctgtacaacgagctgaatctgggcaggagagaggagtacgacgtgctggataagaggaggggaagggaccccgagatgggaggcaagccaaggagaaagaacccccaggagggcctgtataatgagctgcagaaggacaagatggccgaggcctactccgagatcggcatgaagggagagcggcgcaggggcaagggacacgatggcctgtatcagggcctgtctacagccaccaaggacacctacgatgcactgcacatgcaggccctgcctccaaggtcaggtgaagaaacaagagggctacagtcgttagcggctgctgtggtgccatctgcccagacccttaaaattactgactttagcttcagtgactttgagctgtctgatctggaaacagcactgtgtacaattcggatgtttactgacctcaaccttgtgcagaacttccagatgaaacatgaggttctttgcagatggattttaagtgttaagaagaattatcggaagaatgttgcctatcataattggagacatgcctttaatacagctcagtgcatgtttgctgctctaaaagcaggcaaaattcagaacaagctgactgacctggagatacttgcattgctgattgctgcactaagccacgatttggatcaccgtggtgtgaataactcttacatacagcgaagtgaacatccacttgcccagctttactgccattcaatcatggaacaccatcattttgaccagtgcctgatgattcttaatagtccaggcaatcagattctcagtggcctctccattgaagaatataagaccacgttgaaaataatcaagcaagctattttagctacagacctagcactgtacattaagaggcgaggagaattttttgaaattataagaaaaaatcaattcaatttggaagatcctcatcaaaaggagttgtttttggcaatgctgatgacagcttgtgatctttctgcaattacaaaaccctggcctattcaacaacggatagcagaacttgtagcaaccgaattttttgatcaaggagacagagagagaaaagaactcaacatagaacccactgatctaatgaacagggagaagaaaaacaaaatcccaagtatgcaagttgggttcatagatgccatctgcttgcaactgtatgaggccctgacccacgtgtcagaggactgtttccctttgctagatggctgcaggaagaacaggcagaaatggcaggcccttgcagaacagcagtag

SEQ ID NO: 9005 - DNA, 2472 bp, Artificial Sequence
  source: /note="Description of Artificial Sequence: Synthetic polynucleotide"
atggcactgcctgtgaccgccctgctgctgccactggccctgctgctgcacgcagccaggccctatccttacgatgtgcccgactatgctgacatccagatgacacagaccacaagctccctgtccgcctctctgggcgacagagtgaccatcagctgccgggcctcccaggatatctctaagtatctgaactggtaccagcagaagcccgatggcacagtgaagctgctgatctatcacaccagccgcctgcactccggagtgccttctaggttcagcggctccggctctggcacagactacagcctgaccatctccaacctggagcaggaggatatcgccacctatttctgccagcagggcaatacactgccttacacctttggcggcggcacaaagctggagatcaccggaggaggaggcagcggaggaggaggctccggcggcggcggctctgaggtgaagctgcaggagtccggaccaggcctggtggcacctagccagtccctgtctgtgacatgtaccgtgtccggcgtgtctctgccagactacggcgtgtcttggatcaggcagccacctaggaagggcctggagtggctgggcgtgatctggggcagcgagacaacatactataattctgccctgaagagcagactgacaatcatcaaggacaacagcaagtcccaggtgttcctgaagatgaatagcctgcagacagacgataccgccatctactattgcgccaagcactactattacggcggcagctatgccatggattactggggccagggcacatccgtgaccgtgtctagcaccacaaccccagcacctcgcccaccaacaccagcaccaaccatcgcatcccagccactgtctctgaggcccgaggcatgtaggcctgcagcaggaggcgccgtgcacaccaggggcctggactttgcctgcgatatctatatctgggcaccactggcaggaacatgtggcgtgctgctgctgtccctggtcatcaccctgtattgcaagagaggccggaagaagctgctgtacatcttcaagcagcccttcatgaggcccgtgcagacaacccaggaggaggacggctgcagctgtcggttcccagaggaggaggagggaggatgtgagctgagggtgaagttttctaggagcgccgatgcaccagcatataagcagggacagaaccagctgtacaacgagctgaatctgggcaggagagaggagtacgacgtgctggataagaggaggggaagggaccccgagatgggaggcaagccaaggagaaagaacccccaggagggcctgtataatgagctgcagaaggacaagatggccgaggcctactccgagatcggcatgaagggagagcggcgcaggggcaagggacacgatggcctgtatcagggcctgtctacagccaccaaggacacctacgatgcactgcacatgcaggccctgcctccaaggtcaggtgaagaaacaagagagctacagtcgttagcggctgctgtggtgccatctgcccagacccttaaaattactgactttagcttcagtgactttgagctgtctgatctggaaacagcactgtgtacaattcggatgtttactgacctcaaccttgtgcagaacttccagatgaaacatgaggttctttgcagatggattttaagtgttaagaagaattatcggaagaatgttgcctatcataattggagacatgcctttaatacagctcagtgcatgtttgctgctctaaaagcaggcaaaattcggaacaagctgactgacctggagatacttgcattgctgattgctgcactaagccacgatttggatcaccgtggtgtgaataactcttacatacagcgaagtgaacatccacttgcccagctttactgccattcaatcatggaacaccatcattttgaccagtgcctgatgattcttaatagtccaggcaatcagattctcagtggcctctccattgaagaatataagaccacgttgaaaataatcaagcaagctattttagctacagacctagcactgtacattaagaggcgaggagaattttttgaacttataagaaaaaatcaattcaatttggaagatcctcatcaaaagaagttgtttttggcaatgctgatgacagcttgtgatctttctgcaattacaaaaccctggcctattcaacaacggatagcagaacttgtagcaactgaattttttgatcaaggagacagagagagaaaagaactcaacatagaacccactgatctaatgaacagggagaagaaaaacaaaaccccaagtatgcaagttgggttcatagatgccatctgcttgcaactgtatgaggccctgacccacgtgtcagaggactgtttccctttgctagatggctgcagaaagaacaggcagaaatggcaggcccttgcagaacagcagtag

SEQ ID NO: 9006 - DNA, 2472 bp, Artificial Sequence
  source: /note="Description of Artificial Sequence: Synthetic polynucleotide"
atggcactgcctgtgaccgccctgctgctgccactggccctgctgctgcacgcagccaggccctatccttacgatgtgcccgactatgctgacatccagatgacacagaccacaagctccctgtccgcctctctgggcgacagagtgaccatcagctgccgggcctcccaggatatctctaagtatctgaactggtaccagcagaagcccgatggcacagtgaagctgctgatctatcacaccagccgcctgcactccggagtgccttctaggttcagcggctccggctctggcacagactacagcctgaccatctccaacctggagcaggaggatatcgccacctatttctgccagcagggcaatacactgccttacacctttggcggcggcacaaagctggagatcaccggaggaggaggcagcggaggaggaggctccggcggcggcggctctgaggtgaagctgcaggagtccggaccaggcctggtggcacctagccagtccctgtctgtgacatgtaccgtgtccggcgtgtctctgccagactacggcgtgtcttggatcaggcagccacctaggaagggcctggagtggctgggcgtgatctggggcagcgagacaacatactataattctgccctgaagagcagactgacaatcatcaaggacaacagcaagtcccaggtgttcctgaagatgaatagcctgcagacagacgataccgccatctactattgcgccaagcactactattacggcggcagctatgccatggattactggggccagggcacatccgtgaccgtgtctagcaccacaaccccagcacctcgcccaccaacaccagcaccaaccatcgcatcccagccactgtctctgaggcccgaggcatgtaggcctgcagcaggaggcgccgtgcacaccaggggcctggactttgcctgcgatatctatatctgggcaccactggcaggaacatgtggcgtgctgctgctgtccctggtcatcaccctgtattgcaagagaggccggaagaagctgctgtacatcttcaagcagcccttcatgaggcccgtgcagacaacccaggaggaggacggctgcagctgtcggttcccagaggaggaggagggaggatgtgagctgagggtgaagttttctaggagcgccgatgcaccagcatataagcagggacagaaccagctgtacaacgagctgaatctgggcaggagagaggagtacgacgtgctggataagaggaggggaagggaccccgagatgggaggcaagccaaggagaaagaacccccaggagggcctgtataatgagctgcagaaggacaagatggccgaggcctactccgagatcggcatgaagggagagcggcgcaggggcaagggacacgatggcctgtatcagggcctgtctacagccaccaaggacacctacgatgcactgcacatgcaggccctgcctccaaggtcaggtgaagaaacaagagagctacagtcgttagcggctgccgtggtgccatctgcccagacccttaaaattactgactttagcttcagtgactttgagctgtctgatctggaaacagcactgtgtacaattcggatgtttactgacctcaaccttgtgcagaacttccagatgaaacatgaggttctttgcagatggattttaagtgttaagaagaattatcggaagaatgttgcctatcataattggagacatgcctttaatacagctcagtgcatgtttgctgctctaaaagcaggcaaaattcagaacaagctaactgacctggagatacttgcattgctgattgctgcactaagccacgatttggatcaccgtggtgtgaataactcttacatacagcgaagtgaacatccacctgcccagctttactgccattcaatcatggaacaccatcattttgaccagtgcctgatgattcttaatagtccaggcaatcagattctcagtggcctctccattgaagaatataagaccacgttgaaaataatcaagcaagctattttagctacagacctagcactgtacattaagaggcgaggagaattttttgaacttataagaaaaaatcaattcaatttggaagatcctcatcaaaaggagttgtttttggcaatgctgatgacagcttgtgatctttctgcaattacaaaaccctggcctattcaacaacggatagcagaacttgtagcaactgaattttttgatcaaggagacagagagagaaaagaactcaacatagaacccactgatctaatgaacagggagaagaaaaacaaaatcccaagtatgcaagttgggttcatagatgccatctgcttgcaactgtatgaggccctgacccacgtgttagaggactgtttccctttgctagatggctgcagaaagaacaggcagaaatggcaggcccttgcagaacagcagtag

SEQ ID NO: 9007 - DNA, 2472 bp, Artificial Sequence
  source: /note="Description of Artificial Sequence: Synthetic polynucleotide"
atggcactgcctgtgaccgccctgctgctgccactggccctgctgctgcacgcagccaggccctatccttacgatgtgcccgactatgctgacatccagatgacacagaccacaagctccctgtccgcctctctgggcgacagagtgaccatcagctgccgggcctcccaggatatctctaagtatctgaactggtaccagcagaagcccgatggcacagtgaagctgctgatctatcacaccagccgcctgcactccggagtgccttctaggttcagcggctccggctctggcacagactacagcctgaccatctccaacctggagcaggaggatatcgccacctatttctgccagcagggcaatacactgccttacacctttggcggcggcacaaagctggagatcaccggaggaggaggcagcggaggaggaggctccggcggcggcggctctgaggtgaagctgcaggagtccggaccaggcctggtggcacctagccagtccctgtctgtgacatgtaccgtgtccggcgtgtctctgccagactacggcgtgtcttggatcaggcagccacctaggaagggcctggagtggctgggcgtgatctggggcagcgagacaacatactataattctgccctgaagagcagactgacaatcatcaaggacaacagcaagtcccaggtgttcctgaagatgaatagcctgcagacagacgataccgccatctactattgcgccaagcactactattacggcggcagctatgccatggattactggggccagggcacatccgtgaccgtgtctagcaccacaaccccagcacctcgcccaccaacaccagcaccaaccatcgcatcccagccactgtctctgaggcccgaggcatgtaggcctgcagcaggaggcgccgtgcacaccaggggcctggactttgcctgcgatatctatatctgggcaccactggcaggaacatgtggcgtgctgctgctgtccctggtcatcaccctgtattgcaagagaggccggaagaagctgctgtacatcttcaagcagcccttcatgaggcccgtgcagacaacccaggaggaggacggctgcagctgtcggttcccagaggaggaggagggaggatgtgagctgagggtgaagttttctaggagcgccgatgcaccagcatataagcagggacagaaccagctgtacaacgagctgaatctgggcaggagagaggagtacgacgtgctggataagaggaggggaagggaccccgagatgggaggcaagccaaggagaaagaacccccaggagggcctgtataatgagctgcagaaggacaagatggccgaggcctactccgagatcggcatgaagggagagcggcgcaggggcaagggacacgatggcctgtatcagggcctgtctacagccaccaaggacacctacgatgcactgcacatgcaggccctgcctccaaggtcaggtgaagaaacaagagagctacagtcgttagcggctgctgtggtgccatctgcccagacccttaaaattactgactttagcttcagtgactttgagctgtctgatctggaaacagcactgtgtacaattcggatgtttactgacctcaaccttgtgcagaacttccagatgaaacatgaggttctttgcagatggattttaagtgttaagaagaattatcggaagaatgttgcctatcataattggagacatgcctttaatacagctcagtgcatgtttgctgctctaaaagcaggcaaaattcagaacaagctgactgacctggagatacttgcattgctgattgctgcactaagccacgatttggatcaccgtggtgtgaataactcttacatacagcgaagtgaacatccacttgcccagctttactgccattcaatcatggaacaccatcattttgaccagtgcctgacgattcttaatagtccaggcaatcagattctcagtggcctctccattgaagaatataagaccacgttgaaaataatcaagcaagctattttagctacagacctagcactgtacattaagaggcgaggagagttttttgaacttataagaaaaaatcaattcaatttggaagatcctcatcaaaaggagttgtttttggcaatgctgatgacagcttgtaatctttctgcaattacaaaaccctggcctattcaacaacggatagcagaacttgtagcaactgaattttttgatcaaggagacagagagagaaaagaactcaacatagaacccactgatctaatgaacagggagaagaaaaacaaaatcccaagtatgcaagttgggttcatagatgccatctgcttgcaactgtatgaggccctgacccacgtgtcagaggactgtttccctttgctagatggctgcagaaagaacaggcagaaatggcaggcccttgcagaacagcagtag

SEQ ID NO: 9008 - DNA, 2472 bp, Artificial Sequence
  source: /note="Description of Artificial Sequence: Synthetic polynucleotide"
atggcactgcctgtgaccgccctgctgctgccactggccctgctgctgcacgcagccaggccctatccttacgatgtgcccgactatgctgacatccagatgacacagaccacaagctccctgtccgcctctctgggcgacagagtgaccatcagctgccgggcctcccaggatatctctaagtatctgaactggtaccagcagaagcccgatggcacagtgaagctgctgatctatcacaccagccgcctgcactccggagtgccttctaggttcagcggctccggctctggcacagactacagcctgaccatctccaacctggagcaggaggatatcgccacctatttctgccagcagggcaatacactgccttacacctttggcggcggcacaaagctggagatcaccggaggaggaggcagcggaggaggaggctccggcggcggcggctctgaggtgaagctgcaggagtccggaccaggcctggtggcacctagccagtccctgtctgtgacatgtaccgtgtccggcgtgtctctgccagactacggcgtgtcttggatcaggcagccacctaggaagggcctggagtggctgggcgtgatctggggcagcgagacaacatactataattctgccctgaagagcagactgacaatcatcaaggacaacagcaagtcccaggtgttcctgaagatgaatagcctgcagacagacgataccgccatctactattgcgccaagcactactattacggcggcagctatgccatggattactggggccagggcacatccgtgaccgtgtctagcaccacaaccccagcacctcgcccaccaacaccagcaccaaccatcgcatcccagccactgtctctgaggcccgaggcatgtaggcctgcagcaggaggcgccgtgcacaccaggggcctggactttgcctgcgatatctatatctgggcaccactggcaggaacatgtggcgtgctgctgctgtccctggtcatcaccctgtattgcaagagaggccggaagaagctgctgtacatcttcaagcagcccttcatgaggcccgtgcagacaacccaggaggaggacggctgcagctgtcggttcccagaggaggaggagggaggatgtgagctgagggtgaagttttctaggagcgccgatgcaccagcatataagcagggacagaaccagctgtacaacgagctgaatctgggcaggagagaggagtacgacgtgctggataagaggaggggaagggaccccgagatgggaggcaagccaaggagaaagaacccccaggagggcctgtataatgagctgcagaaggacaagatggccgaggcctactccgagatcggcatgaagggagagcggcgcaggggcaagggacacgatggcctgtatcagggcctgtctacagccaccaaggacacctacgatgcactgcacatgcaggccctgcctccaaggtcaggtgaagaaacaagagagctacagtcgttagcggctgctgtggtgccatctgcccagacccttaaaattactgactttagcttcagtgactttgagctgtctgatctggaaacagcactgtgtacaattcggatgtttactgacctcaaccttgtgcagaacttccagatgaaacatgaggttctttgcagatggattttaagtgttaagaagaattatcggaagaatgttgcctatcataattggagacatgcctttaatacagctcagtgcatgtttgctgctctaaaagcaggcaaaattcagaacaagctgactgacctggagatacttgcattgctgatcgctgcactaagccacgatttggatcaccgtggtgtgaataactcttacatacagcgaagtgaacatccacttgcccagctttactgccattcaatcatggaacaccatcattttgaccagtgcctgatgattcttaatagtccaggcaatcagattctcagtggcctctccattgaagaatataagaccacgttgaaaataatcaagcaagctattttagctacagacctagcactgtacattaagaggcgaggagaattttttgaacttataagaaaaaatcaattcaatttggaagatcctcatcaaaaggagttgtttttggcaatgctgatgacagcttgtgatctttctgccattacaaaaccctggcctattcaacaacggatagcagaacttgtagcaactgaattttttgatcaaggagacagagagagaaaagaactcaacatagaacccactgatctaatgaacggggagaagaaaaacaagatcccaagtatgcaagttgggttcatagatgccatctgcttgcaactgtatgaggccctgacccacgtgtcagaggactgtttcccattgctagatggctgcagaaagaacaggcagaaatggcaggcccttgcagaacagcagtag

SEQ ID NO: 9009 - DNA, 2472 bp, Artificial Sequence
  source: /note="Description of Artificial Sequence: Synthetic polynucleotide"
atggcactgcctgtgaccgccctgctgctgccactggccctgctgctgcacgcagccaggccctatccttacgatgtgcccgactatgctgacatccagatgacacagaccacaagctccctgtccgcctctctgggcgacagagtgaccatcagctgccgggcctcccaggatatctctaagtatctgaactggtaccagcagaagcccgatggcacagtgaagctgctgatctatcacaccagccgcctgcactccggagtgccttctaggttcagcggctccggctctggcacagactacagcctgaccatctccaacctggagcaggaggatatcgccacctatttctgccagcagggcaatacactgccttacacctttggcggcggcacaaagctggagatcaccggaggaggaggcagcggaggaggaggctccggcggcggcggctctgaggtgaagctgcaggagtccggaccaggcctggtggcacctagccagtccctgtctgtgacatgtaccgtgtccggcgtgtctctgccagactacggcgtgtcttggatcaggcagccacctaggaagggcctggagtggctgggcgtgatctggggcagcgagacaacatactataattctgccctgaagagcagactgacaatcatcaaggacaacagcaagtcccaggtgttcctgaagatgaatagcctgcagacagacgataccgccatctactattgcgccaagcactactattacggcggcagctatgccatggattactggggccagggcacatccgtgaccgtgtctagcaccacaaccccagcacctcgcccaccaacaccagcaccaaccatcgcatcccagccactgtctctgaggcccgaggcatgtaggcctgcagcaggaggcgccgtgcacaccaggggcctggactttgcctgcgatatctatatctgggcaccactggcaggaacatgtggcgtgctgctgctgtccctggtcatcaccctgtattgcaagagaggccggaagaagctgctgtacatcttcaagcagcccttcatgaggcccgtgcagacaacccaggaggaggacggctgcagctgtcggttcccagaggaggaggagggaggatgtgagctgagggtgaagttttctaggagcgccgatgcaccagcatataagcagggacagaaccagctgtacaacgagctgaatctgggcaggagagaggagtacgacgtgctggataagaggaggggaagggaccccgagatgggaggcaagccaaggagaaagaacccccaggagggcctgtataatgagctgcagaaggacaagatggccgaggcctactccgagatcggcatgaagggagagcggcgcaggggcaagggacacgatggcctgtatcagggcctgtctacagccaccaaggacacctacgatgcactgcacatgcaggccctgcctccaaggtcaggtgaagaaacaagagagctacagtcgttggcggctgctgtggtgccatctgcccagacccttaaaattactgactttagcttcagtgactttgagttgtctgatctggaaacagcactgtgtacaattcagatgtttactgacctcaaccttgtgcagaacttccagatgaaacatgaggttcttcgcagatggattttaagtgttaagaagaattatcggaagaatgttgcctatcataattggagacatgcctttaatacagctcagtgcatgtttgctgctctaaaagcaggcaaaattcagaacaagctgactgacctggagatacttgcattgctgattgctgcactaagccacgatttggatcaccgtggtgcgaataactcttacatacagcgaagtgaacatccacttgcccagctttactgccattcaatcatggaacaccatcattttgaccagtgcctgatgattcttaatagtccaggcaatcagattctcagtggcctctccattgaagaatataagaccacgttgaaagtaatcaagcaagctattttagctacagacctagcactgtacattaagaggcgaggagaattttttgaacttataagaaaaaatcaattcaatttggaagatcctcatcaaaaggagttgtttttggcaatgctgatgacagcttgtgatctttctgcaattacaaaaccctggcctattcaacaacggatagcagaacttgtagcaactaaattttttgatcaaggagacagagagagaaaagaactcaacatagaacccactgatctaatgaacagggagaagaaaaacaaaatcccaagtatgcaagttgggttcatagatgccatctgcttgcaactgtatgaggccctgacccacgtgtcagaggactgtttccctttgctagatggctgcagaaagaacaggcagaaatggcaggcccctgcagaacagcagtag

SEQ ID NO: 9010 - DNA, 2472 bp, Artificial Sequence
  source: /note="Description of Artificial Sequence: Synthetic polynucleotide"
atggcactgcctgtgaccgccctgctgctgccactggccctgctgctgcacgcagccaggccctatccttacgatgtgcccgactatgctgacatccagatgacacagaccacaagctccctgtccgcctctctgggcgacagagtgaccatcagctgccgggcctcccaggatatctctaagtatctgaactggtaccagcagaagcccgatggcacagtgaagctgctgatctatcacaccagccgcctgcactccggagtgccttctaggttcagcggctccggctctggcacagactacagcctgaccatctccaacctggagcaggaggatatcgccacctatttctgccagcagggcaatacactgccttacacctttggcggcggcacaaagctggagatcaccggaggaggaggcagcggaggaggaggctccggcggcggcggctctgaggtgaagctgcaggagtccggaccaggcctggtggcacctagccagtccctgtctgtgacatgtaccgtgtccggcgtgtctctgccagactacggcgtgtcttggatcaggcagccacctaggaagggcctggagtggctgggcgtgatctggggcagcgagacaacatactataattctgccctgaagagcagactgacaatcatcaaggacaacagcaagtcccaggtgttcctgaagatgaatagcctgcagacagacgataccgccatctactattgcgccaagcactactattacggcggcagctatgccatggattactggggccagggcacatccgtgaccgtgtctagcaccacaaccccagcacctcgcccaccaacaccagcaccaaccatcgcatcccagccactgtctctgaggcccgaggcatgtaggcctgcagcaggaggcgccgtgcacaccaggggcctggactttgcctgcgatatctatatctgggcaccactggcaggaacatgtggcgtgctgctgctgtccctggtcatcaccctgtattgcaagagaggccggaagaagctgctgtacatcttcaagcagcccttcatgaggcccgtgcagacaacccaggaggaggacggctgcagctgtcggttcccagaggaggaggagggaggatgtgagctgagggtgaagttttctaggagcgccgatgcaccagcatataagcagggacagaaccagctgtacaacgagctgaatctgggcaggagagaggagtacgacgtgctggataagaggaggggaagggaccccgagatgggaggcaagccaaggagaaagaacccccaggagggcctgtataatgagctgcagaaggacaagatggccgaggcctactccgagatcggcatgaagggagagcggcgcaggggcaagggacacgatggcctgtatcagggcctgtctacagccaccaaggacacctacgatgcactgcacatgcaggccctgcctccaaggtcaggtgaagaaacaagagagctacagtcgttagcggctgctgtggtgccatctgcccagacccttaaaattactgactttagcttcagtgactttgagctgtctgatctggaaacagcactgtgtacaattcggatgtttactgacctcaaccttgtgcagaacttccagatgaaacatgaggttctttgcagatggattttaagtgttaagaagaattatcggaagaatgttgcctatcataattggagacatgcctttaatacagctcagtgcatgtttgctgctctaaaagcaggcaaaattcagaacaagctgactgacctggagatacttgcattgctgattgctgcactaagccacgacttggatcaccgtggtgtgaataactcttacatacagcgaagtgaacatccacttgcccagctttactgccattcaatcatggaacaccatcattttgaccagtgcctgatgattcttaatagtccaggcaatcagattctcagtggcctctccattgaagaatataagaccacgttgaaaataatcaagcaagctgttttagctacagacctagcactgtacattaagaggcgaggagaattttttgaacttataagaaaaaatcaattcaatttggaagatcctcatcaaaaggagttgtttttggcaatgctgatgacagcttgtgatctttctgcaattacaaaaccctggcctattcaacaacggatagcagaacttgtagcaactgaattttttgatcaaggagacagagagagaaaagaactcaacatagaacccactgatctaatgaacagggagaagaaaaacaaaatcccaagtatgcaagttgggtccatagatgccatctgcttgcaactgtatgaggccctgacccacgtgtcagaggactgtttccctttgctagatggctgcagaaagaacaggcagaaatggcaggcccttgcagaacagcagtag

SEQ ID NO: 9011 - DNA, 2472 bp, Artificial Sequence
  source: /note="Description of Artificial Sequence: Synthetic polynucleotide"
atggcactgcctgtgaccgccctgctgctgccactggccctgctgctgcacgcagccaggccctatccttacgatgtgcccgactatgctgacatccagatgacacagaccacaagctccctgtccgcctctctgggcgacagagtgaccatcagctgccgggcctcccaggatatctctaagtatctgaactggtaccagcagaagcccgatggcacagtgaagctgctgatctatcacaccagccgcctgcactccggagtgccttctaggttcagcggctccggctctggcacagactacagcctgaccatctccaacctggagcaggaggatatcgccacctatttctgccagcagggcaatacactgccttacacctttggcggcggcacaaagctggagatcaccggaggaggaggcagcggaggaggaggctccggcggcggcggctctgaggtgaagctgcaggagtccggaccaggcctggtggcacctagccagtccctgtctgtgacatgtaccgtgtccggcgtgtctctgccagactacggcgtgtcttggatcaggcagccacctaggaagggcctggagtggctgggcgtgatctggggcagcgagacaacatactataattctgccctgaagagcagactgacaatcatcaaggacaacagcaagtcccaggtgttcctgaagatgaatagcctgcagacagacgataccgccatctactattgcgccaagcactactattacggcggcagctatgccatggattactggggccagggcacatccgtgaccgtgtctagcaccacaaccccagcacctcgcccaccaacaccagcaccaaccatcgcatcccagccactgtctctgaggcccgaggcatgtaggcctgcagcaggaggcgccgtgcacaccaggggcctggactttgcctgcgatatctatatctgggcaccactggcaggaacatgtggcgtgctgctgctgtccctggtcatcaccctgtattgcaagagaggccggaagaagctgctgtacatcttcaagcagcccttcatgaggcccgtgcagacaacccaggaggaggacggctgcagctgtcggttcccagaggaggaggagggaggatgtgagctgagggtgaagttttctaggagcgccgatgcaccagcatataagcagggacagaaccagctgtacaacgagctgaatctgggcaggagagaggagtacgacgtgctggataagaggaggggaagggaccccgagatgggaggcaagccaaggagaaagaacccccaggagggcctgtataatgagctgcagaaggacaagatggccgaggcctactccgagatcggcatgaagggagagcggcgcaggggcaagggacacgatggcctgtatcagggcctgtctacagccaccaaggacacctacgatgcactgcacatgcaggccctgcctccaaggtcaggtgaagaaacaagagagctacagtcgttagcggctgctgtggtgccatctgcccagacccttaaaattactgactttagcttcagtgactttgagctgtctgatctggaaacagcactgtgtacaattcggatgtttactgacctcaaccttgtgcagaacttccagatgaaacatgaggttctttgcagatggattttaagtgttaagaagaattatcggaagaatgttgcctatcataactggagacatgcctttaatacagctcagtgcatgtttgctgctctaaaagcaggcaaaattcagaacaagctgactgacctggagatacttgcattgctgattgctgcactaagccacgatttggatcaccgtggtgtgaataactcttacatacagcgaagtgaacatccacttgcccagctttactgccattcaatcatggaacaccatcattttgaccagtgcctgatgattcttaatggtccaggcaatcagattctcagtggcctctccattaaagaatataagaccacgttgaaaataatcaagcaagctattttagctacagacctagcactgtacattaagaggcgaggagaattttttgaacttatgagaaaaaatcaattcaatttggaagatcctcatcaaaaggagttgtttttggcaatgctgatgacagctcgtgatctttctgcaattacaaaaccctggcctattcaacaacggatagcagaacttgtagcaactgaattttttgatcaaggagacagagagagaaaagaactcaacatagaacccactgatctaatgaacagggagaagaaaaacaaaatcccaagtatgcaagttgggttcatagatgccatctgcttgcaactgtatgaggccctgacccacgtgtcagaggactgtttccctttgctagatggctgcagaaagaacaggcagaaatggcaggcccttgcagaacagcagtag

SEQ ID NO: 9012 - DNA, 2472 bp, Artificial Sequence
  source: /note="Description of Artificial Sequence: Synthetic polynucleotide"
atggcactgcctgtgaccgccctgctgctgccactggccctgctgctgcacgcagccaggccctatccttacgatgtgcccgactatgctgacatccagatgacacagaccacaagctccctgtccgcctctctgggcgacagagtgaccatcagctgccgggcctcccaggatatctctaagtatctgaactggtaccagcagaagcccgatggcacagtgaagctgctgatctatcacaccagccgcctgcactccggagtgccttctaggttcagcggctccggctctggcacagactacagcctgaccatctccaacctggagcaggaggatatcgccacctatttctgccagcagggcaatacactgccttacacctttggcggcggcacaaagctggagatcaccggaggaggaggcagcggaggaggaggctccggcggcggcggctctgaggtgaagctgcaggagtccggaccaggcctggtggcacctagccagtccctgtctgtgacatgtaccgtgtccggcgtgtctctgccagactacggcgtgtcttggatcaggcagccacctaggaagggcctggagtggctgggcgtgatctggggcagcgagacaacatactataattctgccctgaagagcagactgacaatcatcaaggacaacagcaagtcccaggtgttcctgaagatgaatagcctgcagacagacgataccgccatctactattgcgccaagcactactattacggcggcagctatgccatggattactggggccagggcacatccgtgaccgtgtctagcaccacaaccccagcacctcgcccaccaacaccagcaccaaccatcgcatcccagccactgtctctgaggcccgaggcatgtaggcctgcagcaggaggcgccgtgcacaccaggggcctggactttgcctgcgatatctatatctgggcaccactggcaggaacatgtggcgtgctgctgctgtccctggtcatcaccctgtattgcaagagaggccggaagaagctgctgtacatcttcaagcagcccttcatgaggcccgtgcagacaacccaggaggaggacggctgcagctgtcggttcccagaggaggaggagggaggatgtgagctgagggtgaagttttctaggagcgccgatgcaccagcatataagcagggacagaaccagctgtacaacgagctgaatctgggcaggagagaggagtacgacgtgctggataagaggaggggaagggaccccgagatgggaggcaagccaaggagaaagaacccccaggagggcctgtataatgagctgcagaaggacaagatggccgaggcctactccgagatcggcatgaagggagagcggcgcaggggcaagggacacgatggcctgtatcagggcctgtctacagccaccaaggacacctacgatgcactgcacatgcaggccctgcctccaaggtcaggtgaagaaacaagagagctacagtcgttagcggctgctgtggtgccatctgcccagacccttaaaattactgactttagcttcagtgactttgagctgtctgatctggaaacagcactgtgtacaattcggatgtttactgacctcaaccttgtgcagaacttccagatgaaacatgaggttctttgcagatggattttaagtgttaagaagaattatcggaagaatgttgcctatcataattggagacatgcctttaatacagctcagtgcatgtttgctgctctaaaagcaggcaaaattcagaacaagctgactgacctggagatacttgcattgctgattgctgcactaagccacgatttggatcaccgtggtgtgaataactcttacatacagcgaagtgaacatccactcgcccagctttactgccattcaatcatggaacaccatcattttgaccagtgcctgatgattcttaatagtccaggcaatcagattctcagtggcctctccattgaagaacataagaccacgttgaaaataatcaagcaagctattttagctacagacctagcactgtacattaagaggcgaggagaattttttgaacttataagaaaaaatcaattcaatttggaagatcctcatcaaaaggagttgtttttggcaatgctgatgacagcttgtgatctttctgcaattacaaaaccctggcctattcaacaacggatagcagaacttgtagcaactgaattttttgatcaaggagacagagagagaaaagaactcaacatagaacccactgatctaatgaacagggagaagaaaaacagaatcccaagtatgcaagttgggttcatagatgccatctgcttgcaactgtatgaggccccgacccacgtgtcagaggactgtttccctttgctagatggctgcagaaagaacaggcagaaatggcaggcccttgcagaacagcagtag

SEQ ID NO: 9013 - DNA, 2472 bp, Artificial Sequence
  source: /note="Description of Artificial Sequence: Synthetic polynucleotide"
atggcactgcctgtgaccgccctgctgctgccactggccctgctgctgcacgcagccaggccctatccttacgatgtgcccgactatgctgacatccagatgacacagaccacaagctccctgtccgcctctctgggcgacagagtgaccatcagctgccgggcctcccaggatatctctaagtatctgaactggtaccagcagaagcccgatggcacagtgaagctgctgatctatcacaccagccgcctgcactccggagtgccttctaggttcagcggctccggctctggcacagactacagcctgaccatctccaacctggagcaggaggatatcgccacctatttctgccagcagggcaatacactgccttacacctttggcggcggcacaaagctggagatcaccggaggaggaggcagcggaggaggaggctccggcggcggcggctctgaggtgaagctgcaggagtccggaccaggcctggtggcacctagccagtccctgtctgtgacatgtaccgtgtccggcgtgtctctgccagactacggcgtgtcttggatcaggcagccacctaggaagggcctggagtggctgggcgtgatctggggcagcgagacaacatactataattctgccctgaagagcagactgacaatcatcaaggacaacagcaagtcccaggtgttcctgaagatgaatagcctgcagacagacgataccgccatctactattgcgccaagcactactattacggcggcagctatgccatggattactggggccagggcacatccgtgaccgtgtctagcaccacaaccccagcacctcgcccaccaacaccagcaccaaccatcgcatcccagccactgtctctgaggcccgaggcatgtaggcctgcagcaggaggcgccgtgcacaccaggggcctggactttgcctgcgatatctatatctgggcaccactggcaggaacatgtggcgtgctgctgctgtccctggtcatcaccctgtattgcaagagaggccggaagaagctgctgtacatcttcaagcagcccttcatgaggcccgtgcagacaacccaggaggaggacggctgcagctgtcggttcccagaggaggaggagggaggatgtgagctgagggtgaagttttctaggagcgccgatgcaccagcatataagcagggacagaaccagctgtacaacgagctgaatctgggcaggagagaggagtacgacgtgctggataagaggaggggaagggaccccgagatgggaggcaagccaaggagaaagaacccccaggagggcctgtataatgagctgcagaaggacaagatggccgaggcctactccgagatcggcatgaagggagagcggcgcaggggcaagggacacgatggcctgtatcagggcctgtctacagccaccaaggacacctacgatgcactgcacatgcaggccctgcctccaaggtcaggtgaagaaacaagagagctacagtcgttagcggctgctgtggtgccatctgcccagacccttaaaattactgactttagcttcagtgactttgagctgtctgatctggaaacagcactgtgtacaattcggatgtttactgacctcagccttgtgcagaacttccagatgaaacatgaggttctttgcagatggattttaagtgttaagaagaattatcggaagaatgttgcctatcataattggagacatgcctttaatacagctcagtgcatgtttgctgctctaaaagcaggcaaaattcagaacaagctgactgacctggagatacttgcattgctgattgctgcactaagccacgatttggatcaccgtggtgtgaataactcttacatacagcgaagtgaacatccacttgcccagctttactgccattcaatcatggaacaccatcattttgaccagtgcctgatgattcttaatagtccaggcaatcagattctcagtggcctctccattgaagaatataagaccacgttgaaaataatcaagcaagctattttagctacagacctagcactatacattaagaggcgaggagaattttttgaacttataagaaaaaatcaattcaatttggaagatcctcatcaagaggagttgtttttggcaatgctgatgacagcttgtgatctttctgcaattacaaaaccctggcctattcaacaacggatagcagaacttgtagcaactgaattttttgatcaaggagacagagagagaaaagaactcaacatagaacccactgatctaatgaacagggagaagaaaaacaaaatcccaagtatgcaagttgggttcatagatgccatctgcttgcaactgtatgaggccctgacccacgtgtcagaggactgtttccctttgctagatggctccagaaagaacaggcagaaatggcaggcccttgcagaacagcagtag

SEQ ID NO: 9014 - DNA, 2472 bp, Artificial Sequence
  source: /note="Description of Artificial Sequence: Synthetic polynucleotide"
atggcactgcctgtgaccgccctgctgctgccactggccctgctgctgcacgcagccaggccctatccttacgatgtgcccgactatgctgacatccagatgacacagaccacaagctccctgtccgcctctctgggcgacagagtgaccatcagctgccgggcctcccaggatatctctaagtatctgaactggtaccagcagaagcccgatggcacagtgaagctgctgatctatcacaccagccgcctgcactccggagtgccttctaggttcagcggctccggctctggcacagactacagcctgaccatctccaacctggagcaggaggatatcgccacctatttctgccagcagggcaatacactgccttacacctttggcggcggcacaaagctggagatcaccggaggaggaggcagcggaggaggaggctccggcggcggcggctctgaggtgaagctgcaggagtccggaccaggcctggtggcacctagccagtccctgtctgtgacatgtaccgtgtccggcgtgtctctgccagactacggcgtgtcttggatcaggcagccacctaggaagggcctggagtggctgggcgtgatctggggcagcgagacaacatactataattctgccctgaagagcagactgacaatcatcaaggacaacagcaagtcccaggtgttcctgaagatgaatagcctgcagacagacgataccgccatctactattgcgccaagcactactattacggcggcagctatgccatggattactggggccagggcacatccgtgaccgtgtctagcaccacaaccccagcacctcgcccaccaacaccagcaccaaccatcgcatcccagccactgtctctgaggcccgaggcatgtaggcctgcagcaggaggcgccgtgcacaccaggggcctggactttgcctgcgatatctatatctgggcaccactggcaggaacatgtggcgtgctgctgctgtccctggtcatcaccctgtattgcaagagaggccggaagaagctgctgtacatcttcaagcagcccttcatgaggcccgtgcagacaacccaggaggaggacggctgcagctgtcggttcccagaggaggaggagggaggatgtgagctgagggtgaagttttctaggagcgccgatgcaccagcatataagcagggacagaaccagctgtacaacgagctgaatctgggcaggagagaggagtacgacgtgctggataagaggaggggaagggaccccgagatgggaggcaagccaaggagaaagaacccccaggagggcctgtataatgagctgcagaaggacaagatggccgaggcctactccgagatcggcatgaagggagagcggcgcaggggcaagggacacgatggcctgtatcagggcctgtctacagccaccaaggacacctacgatgcactgcacatgcaggccctgcctccaaggtcaggtgaagaaacaagagagctacagtcgttagcggctgctgtggtgccatccgcccagacccttaaaattactgactttagcttcagtgactttgagctgtctgatctggaaacagcactgtgtacaattcggatgtttactgacctcaaccttgtgcagaacttccagatgaaacatgaggttctttgcagatggattttaagtgttaagaagaattatcggaagaatgttgcctatcataattggagacatgcctttaatacagctcagtgcatgtttgctgctctaaaagcaggcaaaattcagaacaagctgactgacctggagatacttgcattgctgattgctgcactaagccacgatttggatcaccgtggtgtgaataactcttacatacagcgaagtgaacatccacttgcccagctttactgccattcaattatgggacaccatcattttgaccagtgcctgatgattcttaatagtccaggcaatcagattctcagtggcctctccattgaagaatataagaccacgttgaaaataatcaagcaagctattttagctacagacctagcactgtacattaagaggcgaggagaattttttgaacttataagaaaaaatcaattcaatttggaaaatcctcatcaaaaggagttgtttttggcaatgctgatgacagcttgtgatctttctgcaattacaaaaccctggcctattcaacaacggatagcagaacttgtagcaactgaattttttgatcaaggagacagagagagaaaagaactcaacatagaacccactgatctaatgaacagggagaagaaaaacaaaatcccaagtatgcaagttgggttcatagatgccatctgcttgcaactgtatgaggccctgacccacgtgtcagaggactgtttccctttgctagatggctgcagaaagaacaggcagaaatggcaggcccttgcagaacagcagtag

SEQ ID NO: 9015 - DNA, 2472 bp, Artificial Sequence
  source: /note="Description of Artificial Sequence: Synthetic polynucleotide"
atggcactgcctgtgaccgccctgctgctgccactggccctgctgctgcacgcagccaggccctatccttacgatgtgcccgactatgctgacatccagatgacacagaccacaagctccctgtccgcctctctgggcgacagagtgaccatcagctgccgggcctcccaggatatctctaagtatctgaactggtaccagcagaagcccgatggcacagtgaagctgctgatctatcacaccagccgcctgcactccggagtgccttctaggttcagcggctccggctctggcacagactacagcctgaccatctccaacctggagcaggaggatatcgccacctatttctgccagcagggcaatacactgccttacacctttggcggcggcacaaagctggagatcaccggaggaggaggcagcggaggaggaggctccggcggcggcggctctgaggtgaagctgcaggagtccggaccaggcctggtggcacctagccagtccctgtctgtgacatgtaccgtgtccggcgtgtctctgccagactacggcgtgtcttggatcaggcagccacctaggaagggcctggagtggctgggcgtgatctggggcagcgagacaacatactataattctgccctgaagagcagactgacaatcatcaaggacaacagcaagtcccaggtgttcctgaagatgaatagcctgcagacagacgataccgccatctactattgcgccaagcactactattacggcggcagctatgccatggattactggggccagggcacatccgtgaccgtgtctagcaccacaaccccagcacctcgcccaccaacaccagcaccaaccatcgcatcccagccactgtctctgaggcccgaggcatgtaggcctgcagcaggaggcgccgtgcacaccaggggcctggactttgcctgcgatatctatatctgggcaccactggcaggaacatgtggcgtgctgctgctgtccctggtcatcaccctgtattgcaagagaggccggaagaagctgctgtacatcttcaagcagcccttcatgaggcccgtgcagacaacccaggaggaggacggctgcagctgtcggttcccagaggaggaggagggaggatgtgagctgagggtgaagttttctaggagcgccgatgcaccagcatataagcagggacagaaccagctgtacaacgagctgaatctgggcaggagagaggagtacgacgtgctggataagaggaggggaagggaccccgagatgggaggcaagccaaggagaaagaacccccaggagggcctgtataatgagctgcagaaggacaagatggccgaggcctactccgagatcggcatgaagggagagcggcgcaggggcaagggacacgatggcctgtatcagggcctgtctacagccaccaaggacacctacgatgcactgcacatgcaggccctgcctccaaggtcaggtgaagaaacaagagagctacagtcgttagcggctgctgtggtgccatctgcccagacccttaaaattactgactttagcttcagtgactttgagctgtctgatctggaaacagcactgtgtacaattcggatgtttactgacctcaaccttgtgcagaacttccagatgagacatgaggttctttgcagatggattttaagtgttaagaagaattatcggaagaatgttgcctatcataattggagacatgcctttaatacagctcagtgcatgtttgctgctctaaaagcaggcaaaattcagaacaagctgactgacctggagacacttgcattgctgattgctgcactaagccacgatttggatcaccgtggtgtgaataactcttacatacagcgaagtgaacatccacttgcccagctttactgccattcaatcatggaacaccatcattttgaccagtgcctgatgattcttaatagtccaggcaatcagattctcagtggcctctccattgaagaatataagaccacgttgaaaataatcaagcaagctattttagctacagacctagcactgtacattaagaggcgaggagaattttttgaacttataagaaaaaatcaattcaatttggaagatcctcatcaaaaggagttgtttttggcaatgctgatgacagcttgtgatctttctgcaattacaaaaccctggcctattcaacaacggatagcagaacttgtagcaactgaattttttgatcaaggagacagagagagaaaagaactcaacatagaacccactgatctaatgaacagggagaagaaaaacaaaatcccaagtatgcaagttgggttcatagatgccatctgcttgcaactgtatgaggccctgacccacgtgtcagaggactgcttccctttgctagatggctgcagaaagaacaggcagaaatggcaggcccctgcagaacagcagtag

SEQ ID NO: 9016 - DNA, 2472 bp, Artificial Sequence
  source: /note="Description of Artificial Sequence: Synthetic polynucleotide"
atggcactgcctgtgaccgccctgctgctgccactggccctgctgctgcacgcagccaggccctatccttacgatgtgcccgactatgctgacatccagatgacacagaccacaagctccctgtccgcctctctgggcgacagagtgaccatcagctgccgggcctcccaggatatctctaagtatctgaactggtaccagcagaagcccgatggcacagtgaagctgctgatctatcacaccagccgcctgcactccggagtgccttctaggttcagcggctccggctctggcacagactacagcctgaccatctccaacctggagcaggaggatatcgccacctatttctgccagcagggcaatacactgccttacacctttggcggcggcacaaagctggagatcaccggaggaggaggcagcggaggaggaggctccggcggcggcggctctgaggtgaagctgcaggagtccggaccaggcctggtggcacctagccagtccctgtctgtgacatgtaccgtgtccggcgtgtctctgccagactacggcgtgtcttggatcaggcagccacctaggaagggcctggagtggctgggcgtgatctggggcagcgagacaacatactataattctgccctgaagagcagactgacaatcatcaaggacaacagcaagtcccaggtgttcctgaagatgaatagcctgcagacagacgataccgccatctactattgcgccaagcactactattacggcggcagctatgccatggattactggggccagggcacatccgtgaccgtgtctagcaccacaaccccagcacctcgcccaccaacaccagcaccaaccatcgcatcccagccactgtctctgaggcccgaggcatgtaggcctgcagcaggaggcgccgtgcacaccaggggcctggactttgcctgcgatatctatatctgggcaccactggcaggaacatgtggcgtgctgctgctgtccctggtcatcaccctgtattgcaagagaggccggaagaagctgctgtacatcttcaagcagcccttcatgaggcccgtgcagacaacccaggaggaggacggctgcagctgtcggttcccagaggaggaggagggaggatgtgagctgagggtgaagttttctaggagcgccgatgcaccagcatataagcagggacagaaccagctgtacaacgagctgaatctgggcaggagagaggagtacgacgtgctggataagaggaggggaagggaccccgagatgggaggcaagccaaggagaaagaacccccaggagggcctgtataatgagctgcagaaggacaagatggccgaggcctactccgagatcggcatgaagggagagcggcgcaggggcaagggacacgatggcctgtatcagggcctgtctacagccaccaaggacacctacgatgcactgcacatgcaggccctgcctccaaggtcaggtgaagaaacaagagagctacagtcgttagcggctgctgtggtgccatctgcccagacccttaaaattactgactttagcttcagtgactttgagctgtctgatctggaaacagcactgtgtacaattcggatgtttactgacctcaaccttgtgcagaacttccagatgaaacatgaggttctttgcagatggattttaagtgttaagaagaattatcggaagaatgttgcctatcataactggagacatgcctctaatacagctcagtgcatgtttgctgctctaaaagcaggcaaaattcagaacaagctgactgacctggagatacttgcattgctgattgctgcactaagccacgatttggatcaccgtggtgtgaataactcttacatacagcgaagtgaacatccacttgcccagctttactgccattcaatcatggaacaccatcattttgaccagtgcctgatgattcttaatagtccaggcaatcagattctcagtggcctctccattgaagaatataagaccacgttgaaaataatcaagcaagctattttagctacagacctagcactgtacattaagaggcgaggagaattttttgaacttataagaaaaaatcaattcaatttggaagatcctcatcaaaaggagttgtttttggcaatgctgatgacagcttgtgatctttctgcaattacaaaaccctggcctattcaacaacggatagcagaacttgtagcaactgaattttttgatcaaggagacagagagagaaaagaactcaacatagaacccactgatctaatgaacagggagaagaaaaacaaaatcccaagtatgcaagctgggttcatagatgccatctgcttgcaactgtgtgaggccctgacccacgtgtcagaggactgtttccctttgctagatggctgcagaaagaacaggcagaaatggcaggcccttgcagaacagcagtag

SEQ ID NO: 9017 - DNA, 2472 bp, Artificial Sequence
  source: /note="Description of Artificial Sequence: Synthetic polynucleotide"
atggcactgcctgtgaccgccctgctgctgccactggccctgctgctgcacgcagccaggccctatccttacgatgtgcccgactatgctgacatccagatgacacagaccacaagctccctgtccgcctctctgggcgacagagtgaccatcagctgccgggcctcccaggatatctctaagtatctgaactggtaccagcagaagcccgatggcacagtgaagctgctgatctatcacaccagccgcctgcactccggagtgccttctaggttcagcggctccggctctggcacagactacagcctgaccatctccaacctggagcaggaggatatcgccacctatttctgccagcagggcaatacactgccttacacctttggcggcggcacaaagctggagatcaccggaggaggaggcagcggaggaggaggctccggcggcggcggctctgaggtgaagctgcaggagtccggaccaggcctggtggcacctagccagtccctgtctgtgacatgtaccgtgtccggcgtgtctctgccagactacggcgtgtcttggatcaggcagccacctaggaagggcctggagtggctgggcgtgatctggggcagcgagacaacatactataattctgccctgaagagcagactgacaatcatcaaggacaacagcaagtcccaggtgttcctgaagatgaatagcctgcagacagacgataccgccatctactattgcgccaagcactactattacggcggcagctatgccatggattactggggccagggcacatccgtgaccgtgtctagcaccacaaccccagcacctcgcccaccaacaccagcaccaaccatcgcatcccagccactgtctctgaggcccgaggcatgtaggcctgcagcaggaggcgccgtgcacaccaggggcctggactttgcctgcgatatctatatctgggcaccactggcaggaacatgtggcgtgctgctgctgtccctggtcatcaccctgtattgcaagagaggccggaagaagctgctgtacatcttcaagcagcccttcatgaggcccgtgcagacaacccaggaggaggacggctgcagctgtcggttcccagaggaggaggagggaggatgtgagctgagggtgaagttttctaggagcgccgatgcaccagcatataagcagggacagaaccagctgtacaacgagctgaatctgggcaggagagaggagtacgacgtgctggataagaggaggggaagggaccccgagatgggaggcaagccaaggagaaagaacccccaggagggcctgtataatgagctgcagaaggacaagatggccgaggcctactccgagatcggcatgaagggagagcggcgcaggggcaagggacacgatggcctgtatcagggcctgtctacagccaccaaggacacctacgatgcactgcacatgcaggccctgcctccaaggtcaggtgaagaaacaagagagctacagtcgttagcggctgctgtggagccatctgcccagacccttaaaattactgactttagcttcagtgactttgagctgtctgatctggaaacagcactgtgtacaattcggatgtttactgacctcaaccttgtgcagaacttcctgatgaaacatgaggttctttgcagatggattttaagtgttaagaagaattatcggaagaatgttgcctatcataattggagacatgcctttaatacagctcagtgcatgtttgctgctctaaaagcaggcataattcagaacaagctgactgacctggagatacttgcattgctgattgctgcactaagccacgatttggatcaccgtggtgtgaataactcttacatacagcgaagtgaacatccacttgcccagctttactgccattcaatcacggaacaccatcattttgaccagtgcctgatgattcttaatagtccaggcaatcagattctcattggcctctccattgaagaatataagaccacgttgaaaataatcaagcaagctattttagctacagacctagcactgtacattaagaggcgaggagaattttttgaacttataagaaaaaatcaattcaatttggaagatcctcatcaagaggagttgtttttggcaatgctgatgacagcttgtgatctttctgcaattacaaaaccctggcctattcaacaacggatagcagaacctgtagcaactgaattttttgatcaaggagacagagagagaaaagaactcaacatagaacccactgatctaatgaacagggagaagaaaaacaaaatcccaagtatgcaagttgggttcatagatgccatctgcttgcaactgtatgaggccctgacccacgtgtcagaggactgtttccctttgctagatggctgcagaaagaacaggcagaaatggcaggcccttacagaacagcagtag

SEQ ID NO: 9018 - DNA, 2472 bp, Artificial Sequence
  source: /note="Description of Artificial Sequence: Synthetic polynucleotide"
atggcactgcctgtgaccgccctgctgctgccactggccctgctgctgcacgcagccaggccctatccttacgatgtgcccgactatgctgacatccagatgacacagaccacaagctccctgtccgcctctctgggcgacagagtgaccatcagctgccgggcctcccaggatatctctaagtatctgaactggtaccagcagaagcccgatggcacagtgaagctgctgatctatcacaccagccgcctgcactccggagtgccttctaggttcagcggctccggctctggcacagactacagcctgaccatctccaacctggagcaggaggatatcgccacctatttctgccagcagggcaatacactgccttacacctttggcggcggcacaaagctggagatcaccggaggaggaggcagcggaggaggaggctccggcggcggcggctctgaggtgaagctgcaggagtccggaccaggcctggtggcacctagccagtccctgtctgtgacatgtaccgtgtccggcgtgtctctgccagactacggcgtgtcttggatcaggcagccacctaggaagggcctggagtggctgggcgtgatctggggcagcgagacaacatactataattctgccctgaagagcagactgacaatcatcaaggacaacagcaagtcccaggtgttcctgaagatgaatagcctgcagacagacgataccgccatctactattgcgccaagcactactattacggcggcagctatgccatggattactggggccagggcacatccgtgaccgtgtctagcaccacaaccccagcacctcgcccaccaacaccagcaccaaccatcgcatcccagccactgtctctgaggcccgaggcatgtaggcctgcagcaggaggcgccgtgcacaccaggggcctggactttgcctgcgatatctatatctgggcaccactggcaggaacatgtggcgtgctgctgctgtccctggtcatcaccctgtattgcaagagaggccggaagaagctgctgtacatcttcaagcagcccttcatgaggcccgtgcagacaacccaggaggaggacggctgcagctgtcggttcccagaggaggaggagggaggatgtgagctgagggtgaagttttctaggagcgccgatgcaccagcatataagcagggacagaaccagctgtacaacgagctgaatctgggcaggagagaggagtacgacgtgctggataagaggaggggaagggaccccgagatgggaggcaagccaaggagaaagaacccccaggagggcctgtataatgagctgcagaaggacaagatggccgaggcctactccgagatcggcatgaagggagagcggcgcaggggcaagggacacgatggcctgtatcagggcctgtctacagccaccaaggacacctacgatgcactgcacatgcaggccctgcctccaaggtcaggtgaagaaacaagagagctacagtcgttagcggctgctgtggtgccatctgcccagacccttaaaattactgactttagcttcagtgactttgagctgtctgatctggaaacagcactgtgtacaattcggatgtttactgacctcaaccttgtgcagaacttccagatgaaacatgaggttctttgcagatggattttaagtgttaagaagaattatcggaagaatgttgcctatcataattggagacatgcctttaatacagctcagtgcatgtttgctgctctaaaagcaggcaaaattcagaacaagctgactgacctggagatacttgcattgctgattgctgcactaggccacgatttggatcaccgtggtgtgaataactcttacatacagcgaagtgaacatccacttgcccagctttactgccattcaatcatggaacaccatcattttgaccggtgcctgatgattcttaatagtccaggcaatcagattctcagtggcctctccattgaagaatataagaccacgttgaaaataatcaagcaagctattttagctacagacctagcactgtacattaagaggcgaggagaattttttgaacttataagaaaaaatcaattcaatttggaagatcctcatcaaaaggagttgtttttggcaatgctgatgacagcttgtgatctttctgcaattacaaaaccctggcctattcaacaacggatagcagaacttgtagcaactgaattttttgatcaaggagacagagagagaaaagaactcaacatagaacccactgatctaatgaacagggagaagaaaaacaaaatcccaagtatgcaagttgggttcatagatgccatctgcttgcaactgtatgaggccctgacccacgtgtcagaggactgtttccctttgctagatggctgcagaaagaacaggcagaaatggcaggcccttgcagaacagcagtag

SEQ ID NO: 9019 - DNA, 2472 bp, Artificial Sequence
  source: /note="Description of Artificial Sequence: Synthetic polynucleotide"
atggcactgcctgtgaccgccctgctgctgccactggccctgctgctgcacgcagccaggccctatccttacgatgtgcccgactatgctgacatccagatgacacagaccacaagctccctgtccgcctctctgggcgacagagtgaccatcagctgccgggcctcccaggatatctctaagtatctgaactggtaccagcagaagcccgatggcacagtgaagctgctgatctatcacaccagccgcctgcactccggagtgccttctaggttcagcggctccggctctggcacagactacagcctgaccatctccaacctggagcaggaggatatcgccacctatttctgccagcagggcaatacactgccttacacctttggcggcggcacaaagctggagatcaccggaggaggaggcagcggaggaggaggctccggcggcggcggctctgaggtgaagctgcaggagtccggaccaggcctggtggcacctagccagtccctgtctgtgacatgtaccgtgtccggcgtgtctctgccagactacggcgtgtcttggatcaggcagccacctaggaagggcctggagtggctgggcgtgatctggggcagcgagacaacatactataattctgccctgaagagcagactgacaatcatcaaggacaacagcaagtcccaggtgttcctgaagatgaatagcctgcagacagacgataccgccatctactattgcgccaagcactactattacggcggcagctatgccatggattactggggccagggcacatccgtgaccgtgtctagcaccacaaccccagcacctcgcccaccaacaccagcaccaaccatcgcatcccagccactgtctctgaggcccgaggcatgtaggcctgcagcaggaggcgccgtgcacaccaggggcctggactttgcctgcgatatctatatctgggcaccactggcaggaacatgtggcgtgctgctgctgtccctggtcatcaccctgtattgcaagagaggccggaagaagctgctgtacatcttcaagcagcccttcatgaggcccgtgcagacaacccaggaggaggacggctgcagctgtcggttcccagaggaggaggagggaggatgtgagctgagggtgaagttttctaggagcgccgatgcaccagcatataagcagggacagaaccagctgtacaacgagctgaatctgggcaggagagaggagtacgacgtgctggataagaggaggggaagggaccccgagatgggaggcaagccaaggagaaagaacccccaggagggcctgtataatgagctgcagaaggacaagatggccgaggcctactccgagatcggcatgaagggagagcggcgcaggggcaagggacacgatggcctgtatcagggcctgtctacagccaccaaggacacctacgatgcactgcacatgcaggccctgcctccaaggtcaggtgaagaaacaagagagctacagtcgttagcggctgctgtggtgccatctgcccagacccttaaaattactgactttagcttcagtgactttgggctgtctgatctggaaacagcactgtgtacaattcggatgtttactgacctcaaccttgtgcagaacttccagatgaaacatgaggttctttgcagatggattttaagtgttaagaagaattatcggaagaatgttgcctatcataattggagacatgcctttaatacagctcagtgcatgtttgctgctctaaaagcaggcaaaattcagaacaagctgactgacctggagatacttgcattgctgattgctgcactaagccacgatttggatcaccgtggtgtgaataactcttacatacagcgaagtgaacatccacttgcccagctttactgccattcaatcatggaacaccatcattttgaccagtgcctgatgattcttaatagtccaggcaatcagattctcagtggcctctccattgaagaatataagaccacgttgaaaataatcaagcaagccattttagctacagacctagcactgtacattaagaggcgaggagaattttttgaacttataagaaaaaatcaattcaatttggaagatcctcatcaaaaggagttgtttttggcaatgctgatgacagcttgtgatctttctgcaattacaaaaccctggcctattcaacaacggatagcagaacttgtagcaactgaattttttgatcaaggagacagagagagaaaagaactcaacatagaacccactgatctaatgaacagggagaagaaaaacaaaatcccaagtatgcaagttgggttcatagatgccatctgcttgcaactgtatgaggccctgacccacgtgtcagaggactgtttccctttgctagatggctgcagaaagaacaggcagaaatggcaggcccttgcagaacagcagtag

SEQ ID NO: 9020 - DNA, 2472 bp, Artificial Sequence
  source: /note="Description of Artificial Sequence: Synthetic polynucleotide"
atggcactgcctgtgaccgccctgctgctgccactggccctgctgctgcacgcagccaggccctatccttacgatgtgcccgactatgctgacatccagatgacacagaccacaagctccctgtccgcctctctgggcgacagagtgaccatcagctgccgggcctcccaggatatctctaagtatctgaactggtaccagcagaagcccgatggcacagtgaagctgctgatctatcacaccagccgcctgcactccggagtgccttctaggttcagcggctccggctctggcacagactacagcctgaccatctccaacctggagcaggaggatatcgccacctatttctgccagcagggcaatacactgccttacacctttggcggcggcacaaagctggagatcaccggaggaggaggcagcggaggaggaggctccggcggcggcggctctgaggtgaagctgcaggagtccggaccaggcctggtggcacctagccagtccctgtctgtgacatgtaccgtgtccggcgtgtctctgccagactacggcgtgtcttggatcaggcagccacctaggaagggcctggagtggctgggcgtgatctggggcagcgagacaacatactataattctgccctgaagagcagactgacaatcatcaaggacaacagcaagtcccaggtgttcctgaagatgaatagcctgcagacagacgataccgccatctactattgcgccaagcactactattacggcggcagctatgccatggattactggggccagggcacatccgtgaccgtgtctagcaccacaaccccagcacctcgcccaccaacaccagcaccaaccatcgcatcccagccactgtctctgaggcccgaggcatgtaggcctgcagcaggaggcgccgtgcacaccaggggcctggactttgcctgcgatatctatatctgggcaccactggcaggaacatgtggcgtgctgctgctgtccctggtcatcaccctgtattgcaagagaggccggaagaagctgctgtacatcttcaagcagcccttcatgaggcccgtgcagacaacccaggaggaggacggctgcagctgtcggttcccagaggaggaggagggaggatgtgagctgagggtgaagttttctaggagcgccgatgcaccagcatataagcagggacagaaccagctgtacaacgagctgaatctgggcaggagagaggagtacgacgtgctggataagaggaggggaagggaccccgagatgggaggcaagccaaggagaaagaacccccaggagggcctgtataatgagctgcagaaggacaagatggccgaggcctactccgagatcggcatgaagggagagcggcgcaggggcaagggacacgatggcctgtatcagggcctgtctacagccaccaaggacacctacgatgcactgcacatgcaggccctgcctccaaggtcaggtgaagaaacaagagagctacagtcgttagcggctgctgtggtgccatctgcccagacccttaaaattactgactttagcttcagtgactttgagctgtctgatctggaaacagcactgtgtacaattcggatgtttactgacctcaaccttgtgcagaacttccagatgaaacatgaggttctttgcagatggattttaagtgttaagaagaattatcggaagaatgttgcctatcataattggagacatgcctttaatacagctcagtgcatgtttgctgctctaaaagcaggcaaaattcagaacaagctgactgacctggagatacttgcattgctgattgctgcactaagccacgatttggatcaccgtggtgtgaataactcttacatacagcgaagtgaacatccacttgcccagctttactgccattcaatcatggaacaccatcattttgaccagtgcctgatgattcttaatagtccaggcaatcagattctcagtggcctctccattgaagaatataagaccacgttgaaaataatcaagcaagctattttagctacagacctagcactgtacattaagaggcgaggagaattttttgaacttataagaaaaaatcaattcaatttggaagatcctcatcaaaaggagttgtttttggcaatgctgatgacagcttgtgatctttctgcaattacaaaaccctggcctgttcaacaacggatagcagaacttgtagcaactgaattttttgatcaaggagacagagagagaaaagaactcaacatagaacccactgatctaatgaacagggagaagaaaaacaaaatcccaagtatgcaagttgggttcatagatgccatctgcttgcaactgtatgaggccctgacccacgtgtcagaggactgtttccctttgctagatggctgcagaaagaacaggcagaaatggcaggcccttgcagaacagcagtag

SEQ ID NO: 9021 - DNA, 2472 bp, Artificial Sequence
  source: /note="Description of Artificial Sequence: Synthetic polynucleotide"
atggcactgcctgtgaccgccctgctgctgccactggccctgctgctgcacgcagccaggccctatccttacgatgtgcccgactatgctgacatccagatgacacagaccacaagctccctgtccgcctctctgggcgacagagtgaccatcagctgccgggcctcccaggatatctctaagtatctgaactggtaccagcagaagcccgatggcacagtgaagctgctgatctatcacaccagccgcctgcactccggagtgccttctaggttcagcggctccggctctggcacagactacagcctgaccatctccaacctggagcaggaggatatcgccacctatttctgccagcagggcaatacactgccttacacctttggcggcggcacaaagctggagatcaccggaggaggaggcagcggaggaggaggctccggcggcggcggctctgaggtgaagctgcaggagtccggaccaggcctggtggcacctagccagtccctgtctgtgacatgtaccgtgtccggcgtgtctctgccagactacggcgtgtcttggatcaggcagccacctaggaagggcctggagtggctgggcgtgatctggggcagcgagacaacatactataattctgccctgaagagcagactgacaatcatcaaggacaacagcaagtcccaggtgttcctgaagatgaatagcctgcagacagacgataccgccatctactattgcgccaagcactactattacggcggcagctatgccatggattactggggccagggcacatccgtgaccgtgtctagcaccacaaccccagcacctcgcccaccaacaccagcaccaaccatcgcatcccagccactgtctctgaggcccgaggcatgtaggcctgcagcaggaggcgccgtgcacaccaggggcctggactttgcctgcgatatctatatctgggcaccactggcaggaacatgtggcgtgctgctgctgtccctggtcatcaccctgtattgcaagagaggccggaagaagctgctgtacatcttcaagcagcccttcatgaggcccgtgcagacaacccaggaggaggacggctgcagctgtcggttcccagaggaggaggagggaggatgtgagctgagggtgaagttttctaggagcgccgatgcaccagcatataagcagggacagaaccagctgtacaacgagctgaatctgggcaggagagaggagtacgacgtgctggataagaggaggggaagggaccccgagatgggaggcaagccaaggagaaagaacccccaggagggcctgtataatgagctgcagaaggacaagatggccgaggcctactccgagatcggcatgaagggagagcggcgcaggggcaagggacacgatggcctgtatcagggcctgtctacagccaccaaggacacctacgatgcactgcacatgcaggccctgcctccaaggtcaggtgaagaaacaagagagctacagtcgttagcggctgctgtggtgccatctgcccagacccttaaaattactgactttagcttcagtgactttgagctgtctgatctggaaacagcactgtgtacaattcggatgtttactgacctcaaccttgtgcagaacttccagatgagacatgaggttctttgcagatggattttaagtgttaagaagaattatcggaagaatgttgcctatcataattggagacatgcctttaatacagctcagtgcatgtttgctgctctaaaagcaggcaaaattcagaacaagctgactgacctggagatacttgcattgctgattgctgcactaagccacgatttggatcaccgtggtgtgaataactcttacatacagcgaagtgaacatccacttgcccagctttactgccattcaatcatggaacaccatcattttgaccagtgcctgatgattcttaatagtccaggcaatcagattctcagtggcctctccattgaagaatataagaccacgttgaaaataatcaagcaagctattttagctacagacctagcactgtacattaagaggcgaggagaattttttgaacttataagaaaaaatcaattcaatttggaagatcctcatcaaaaggagttgtttttggcaatgctgatgacagcttgtgatctttctgcaattacaaaaccctggcctattcaacaacggatagcagaacttgtagcaactgaattttttgatcaaggagacagagagagaaaagaactcaacatagaacccactgatctaatgaacagggagaagaaaaacaaaatcccaagtatgcaagttgggttcatagatgccatctgcttgcaactgtatgaggccctgacccacgtgtcagaggactgtttccctttgctagatggctgcagaaagaacaggcagaaatggcaggcccttgcagaacagcagtag

SEQ ID NO: 9022 - DNA, 2472 bp, Artificial Sequence
  source: /note="Description of Artificial Sequence: Synthetic polynucleotide"
atggcactgcctgtgaccgccctgctgctgccactggccctgctgctgcacgcagccaggccctatccttacgatgtgcccgactatgctgacatccagatgacacagaccacaagctccctgtccgcctctctgggcgacagagtgaccatcagctgccgggcctcccaggatatctctaagtatctgaactggtaccagcagaagcccgatggcacagtgaagctgctgatctatcacaccagccgcctgcactccggagtgccttctaggttcagcggctccggctctggcacagactacagcctgaccatctccaacctggagcaggaggatatcgccacctatttctgccagcagggcaatacactgccttacacctttggcggcggcacaaagctggagatcaccggaggaggaggcagcggaggaggaggctccggcggcggcggctctgaggtgaagctgcaggagtccggaccaggcctggtggcacctagccagtccctgtctgtgacatgtaccgtgtccggcgtgtctctgccagactacggcgtgtcttggatcaggcagccacctaggaagggcctggagtggctgggcgtgatctggggcagcgagacaacatactataattctgccctgaagagcagactgacaatcatcaaggacaacagcaagtcccaggtgttcctgaagatgaatagcctgcagacagacgataccgccatctactattgcgccaagcactactattacggcggcagctatgccatggattactggggccagggcacatccgtgaccgtgtctagcaccacaaccccagcacctcgcccaccaacaccagcaccaaccatcgcatcccagccactgtctctgaggcccgaggcatgtaggcctgcagcaggaggcgccgtgcacaccaggggcctggactttgcctgcgatatctatatctgggcaccactggcaggaacatgtggcgtgctgctgctgtccctggtcatcaccctgtattgcaagagaggccggaagaagctgctgtacatcttcaagcagcccttcatgaggcccgtgcagacaacccaggaggaggacggctgcagctgtcggttcccagaggaggaggagggaggatgtgagctgagggtgaagttttctaggagcgccgatgcaccagcatataagcagggacagaaccagctgtacaacgagctgaatctgggcaggagagaggagtacgacgtgctggataagaggaggggaagggaccccgagatgggaggcaagccaaggagaaagaacccccaggagggcctgtataatgagctgcagaaggacaagatggccgaggcctactccgagatcggcatgaagggagagcggcgcaggggcaagggacacgatggcctgtatcagggcctgtctacagccaccaaggacacctacgatgcactgcacatgcaggccctgcctccaaggtcaggtgaagaaacaagagagctacagtcgttagcggctgctgtggtgccatctgcccagacccttaaaattactgactctagcttcagtgactttgagctgtctgatctggaaacagcactgtgtacaattcggatgtttactgacctcaaccttgtgcagaacttccagatgaaacatgaggttctttgcagatggattttaagtgttaagaagaattatcggaagaatgttgcctatcataattggagacatgcctttaatacagctcagtgcatgtttgctgctctaaaagcaggcaaaattcagaacaagctgactgacctggagatacttgcattgctgattgctgcactaagccacgatttggatcaccgtggtgtgaataactcttacatacagcgaagtgaacatccacttgcccagctttactgccattcaatcatggaacaccatcattttgaccagtgcctgatgattcttaatagtccaggcaatcagattctcagtggcctctccattgaagaatgtaagaccacgttgaaaataatcaagcaagctattttagctacagacctagcactgtacattaagaggcgaggagaattttttgaacttataagaaaaaatcaattcaatttggaagatcctcatcaaaaggagttgtttttggcaatgctgacgacagcttgtgatctttctgcaattacaaaaccctggcctattcaacaacggatagcagaacttgtagcaactgaattttttgatcaaggagacagagagagaaaagaactcaacatagaacccactgatctaatgaacagggagaagaaaaacaaaatcccaagtatgcaagttgggttcatagatgccatctgcttgcaactgtatgaggccctgacccacgtgtcagaggactgtttccctttgttagatggctgcagaaagaacaggcagaaatggcaggcccttgcagaacagcagtag

SEQ ID NO: 9023 - DNA, 2472 bp, Artificial Sequence
  source: /note="Description of Artificial Sequence: Synthetic polynucleotide"
atggcactgcctgtgaccgccctgctgctgccactggccctgctgctgcacgcagccaggccctatccttacgatgtgcccgactatgctgacatccagatgacacagaccacaagctccctgtccgcctctctgggcgacagagtgaccatcagctgccgggcctcccaggatatctctaagtatctgaactggtaccagcagaagcccgatggcacagtgaagctgctgatctatcacaccagccgcctgcactccggagtgccttctaggttcagcggctccggctctggcacagactacagcctgaccatctccaacctggagcaggaggatatcgccacctatttctgccagcagggcaatacactgccttacacctttggcggcggcacaaagctggagatcaccggaggaggaggcagcggaggaggaggctccggcggcggcggctctgaggtgaagctgcaggagtccggaccaggcctggtggcacctagccagtccctgtctgtgacatgtaccgtgtccggcgtgtctctgccagactacggcgtgtcttggatcaggcagccacctaggaagggcctggagtggctgggcgtgatctggggcagcgagacaacatactataattctgccctgaagagcagactgacaatcatcaaggacaacagcaagtcccaggtgttcctgaagatgaatagcctgcagacagacgataccgccatctactattgcgccaagcactactattacggcggcagctatgccatggattactggggccagggcacatccgtgaccgtgtctagcaccacaaccccagcacctcgcccaccaacaccagcaccaaccatcgcatcccagccactgtctctgaggcccgaggcatgtaggcctgcagcaggaggcgccgtgcacaccaggggcctggactttgcctgcgatatctatatctgggcaccactggcaggaacatgtggcgtgctgctgctgtccctggtcatcaccctgtattgcaagagaggccggaagaagctgctgtacatcttcaagcagcccttcatgaggcccgtgcagacaacccaggaggaggacggctgcagctgtcggttcccagaggaggaggagggaggatgtgagctgagggtgaagttttctaggagcgccgatgcaccagcatataagcagggacagaaccagctgtacaacgagctgaatctgggcaggagagaggagtacgacgtgctggataagaggaggggaagggaccccgagatgggaggcaagccaaggagaaagaacccccaggagggcctgtataatgagctgcagaaggacaagatggccgaggcctactccgagatcggcatgaagggagagcggcgcaggggcaagggacacgatggcctgtatcagggcctgtctacagccaccaaggacacctacgatgcactgcacatgcaggccctgcctccaaggtcaggtgaagaaacaagagagctacagtcgttagcggctgctgtggtgccatctgcccagacccttaaaattactgactttagcttcagtgactttgagctgtctgatctggaaacagcactgtgtacaattcggatgtttactgacctcaaccttgtgcagaacttccagatgaaacatgaggttctttgcagatggattttaagtgttaagaagaattatcggaagaatgttgcctatcataattggagacatgcctttaatacagctcagtgcatgtttgctgctctaaaagcaggcaaaattcagaacaagctgactgacctggagatacttgcattgctgattgttacactaagccacgatttggatcaccgtggtgtgaataactcttacatacagcgaagtgaacatccacttgcccagctttactgccattcaatcatggaacaccatcattttgaccagtgcctgatgattcttaatagtccaggcaatcagattctcagtggcctctccattgaagaatataagaccacgttgaaaataatcaagcaagctattttagctacagacctagcactgtacattgagaggcgaggagaattttttgaacttataagaaaaaatcaattcaatttggaagatcctcatcaaaaggagttgtttttggcaatgctgatgacagcttgtgatctttctgcaattacaaaaccctggcctattcaacaacggatagcagaacttgtagcaactgaattttttgatcaaggagacagagagagaaaagaactcaatatagaacccactgatctaatgaacagggagaagaaaaacaaaatcccaagtatgcaagttgggttcatagatgccatctgcttgcaactgtataaggccctgacccacgtgtcagaggactgcttccctttgctagatggctgcagaaagaacaggcagaaatggcaggcccttgcagaacagcagtag

SEQ ID NO: 9024 - DNA, 2472 bp, Artificial Sequence
  source: /note="Description of Artificial Sequence: Synthetic polynucleotide"
atggcactgcctgtgaccgccctgctgctgccactggccctgctgctgcacgcagccaggccctatccttacgatgtgcccgactatgctgacatccagatgacacagaccacaagctccctgtccgcctctctgggcgacagagtgaccatcagctgccgggcctcccaggatatctctaagtatctgaactggtaccagcagaagcccgatggcacagtgaagctgctgatctatcacaccagccgcctgcactccggagtgccttctaggttcagcggctccggctctggcacagactacagcctgaccatctccaacctggagcaggaggatatcgccacctatttctgccagcagggcaatacactgccttacacctttggcggcggcacaaagctggagatcaccggaggaggaggcagcggaggaggaggctccggcggcggcggctctgaggtgaagctgcaggagtccggaccaggcctggtggcacctagccagtccctgtctgtgacatgtaccgtgtccggcgtgtctctgccagactacggcgtgtcttggatcaggcagccacctaggaagggcctggagtggctgggcgtgatctggggcagcgagacaacatactataattctgccctgaagagcagactgacaatcatcaaggacaacagcaagtcccaggtgttcctgaagatgaatagcctgcagacagacgataccgccatctactattgcgccaagcactactattacggcggcagctatgccatggattactggggccagggcacatccgtgaccgtgtctagcaccacaaccccagcacctcgcccaccaacaccagcaccaaccatcgcatcccagccactgtctctgaggcccgaggcatgtaggcctgcagcaggaggcgccgtgcacaccaggggcctggactttgcctgcgatatctatatctgggcaccactggcaggaacatgtggcgtgctgctgctgtccctggtcatcaccctgtattgcaagagaggccggaagaagctgctgtacatcttcaagcagcccttcatgaggcccgtgcagacaacccaggaggaggacggctgcagctgtcggttcccagaggaggaggagggaggatgtgagctgagggtgaagttttctaggagcgccgatgcaccagcatataagcagggacagaaccagctgtacaacgagctgaatctgggcaggagagaggagtacgacgtgctggataagaggaggggaagggaccccgagatgggaggcaagccaaggagaaagaacccccaggagggcctgtataatgagctgcagaaggacaagatggccgaggcctactccgagatcggcatgaagggagagcggcgcaggggcaagggacacgatggcctgtatcagggcctgtctacagccaccaaggacacctacgatgcactgcacatgcaggccctgcctccaaggtcaggtgaagaaacaagagagctacagtcgttagcggctgctgtggtgccatctgcccagacccttaaaattactgactttagcttcagtgactttgagctgtctgatctggaaacagcactgtgtacaattcggatgtttactgacctcaaccttgtgcagaacttccagatgaaacatgaggttctttgcagatggattttaagtgttaagaagaattatcggaagaatgttgcctatcataattggagacatgcctttaatacagctcagtgcatgtttgctgctctaaaagcaggcaaaattcagaacaagctgactgacctggagatacttgcattgctgattgctgcactaagccacgatttggatcaccgtggtgtgaataactcttacatacagcgaagtgaacatccacttgcccagctttactgccattcaatcatggaacaccatcattttgaccagtgcctgatgattcttaatagtccaggcaatcagattctcagtggcctctccattgaagaatataagaccacgttgaaaataatcaagcaagctattttagctacagacctagcactgtgcattaagaggcgaggagaattttttgaacttataagaaaaaatcaattcaatttggaagatcctcatcaaaaggagttgtttttggcaatgctgatgacagcttgtgatctttctgcaattacaaaaccctggcctattcaacaacggatagcagaacttgtagcaactgaattttttgatcaaggagacagagagagaaaagaactcaacatagaacccactgatctaatgaacagggagaagaaaaacaaaatcccaagtatgcgagttgggttcatagatgccatctgcttgcaactgtatgaggccctgacccacgtgtcagaggactgtttccctttgctagatggctgcagaaagaacaggcagaaatggcaggcccttgcagaacagcagtag

SEQ ID NO: 9025 - DNA, 2472 bp, Artificial Sequence
  source: /note="Description of Artificial Sequence: Synthetic polynucleotide"
atggcactgcctgtgaccgccctgctgctgccactggccctgctgctgcacgcagccaggccctatccttacgatgtgcccgactatgctgacatccagatgacacagaccacaagctccctgtccgcctctctgggcgacagagtgaccatcagctgccgggcctcccaggatatctctaagtatctgaactggtaccagcagaagcccgatggcacagtgaagctgctgatctatcacaccagccgcctgcactccggagtgccttctaggttcagcggctccggctctggcacagactacagcctgaccatctccaacctggagcaggaggatatcgccacctatttctgccagcagggcaatacactgccttacacctttggcggcggcacaaagctggagatcaccggaggaggaggcagcggaggaggaggctccggcggcggcggctctgaggtgaagctgcaggagtccggaccaggcctggtggcacctagccagtccctgtctgtgacatgtaccgtgtccggcgtgtctctgccagactacggcgtgtcttggatcaggcagccacctaggaagggcctggagtggctgggcgtgatctggggcagcgagacaacatactataattctgccctgaagagcagactgacaatcatcaaggacaacagcaagtcccaggtgttcctgaagatgaatagcctgcagacagacgataccgccatctactattgcgccaagcactactattacggcggcagctatgccatggattactggggccagggcacatccgtgaccgtgtctagcaccacaaccccagcacctcgcccaccaacaccagcaccaaccatcgcatcccagccactgtctctgaggcccgaggcatgtaggcctgcagcaggaggcgccgtgcacaccaggggcctggactttgcctgcgatatctatatctgggcaccactggcaggaacatgtggcgtgctgctgctgtccctggtcatcaccctgtattgcaagagaggccggaagaagctgctgtacatcttcaagcagcccttcatgaggcccgtgcagacaacccaggaggaggacggctgcagctgtcggttcccagaggaggaggagggaggatgtgagctgagggtgaagttttctaggagcgccgatgcaccagcatataagcagggacagaaccagctgtacaacgagctgaatctgggcaggagagaggagtacgacgtgctggataagaggaggggaagggaccccgagatgggaggcaagccaaggagaaagaacccccaggagggcctgtataatgagctgcagaaggacaagatggccgaggcctactccgagatcggcatgaagggagagcggcgcaggggcaagggacacgatggcctgtatcagggcctgtctacagccaccaaggacacctacgatgcactgcacatgcaggccctgcctccaaggtcaggtgaagaaacaagagagctacagtcgttagcggctgctgtggtgccatctgcccagacccttaaaattactgactttagcttcagtgactttgagctgtctgatctggaaacagcactgtgtacaattcggatgtttactgacctcaaccttgtgcagaacttccagatgaaacatgaggttccttgcagatggattttaagtgttaagaagaattatcggaagaatgttgcctatcataattggagacatgcctttaatacagctcagtgcatgtttgctgctctaaaagcaggcaaaattcagaacaagctgactgacctggagatacttgcattgctgattgctgcactaagccacgatttggatcaccgtggtgtgaataactcttacatacagcgaagtgaacatccacttgcccagctttactgccactcaatcatggaacaccatcattttgaccagtgcctgatgattcttaatagtccaggcaatcagattctcagtggcctctccattgaagaatataagaccacgttgaaaataatcaagcaagctattttagctacagacctagcactgtacattaagaggcgaggagaattttttgaacttataagaagaaatcaattcaatttggaagatcctcatcaaaaggagttgtttttggcaatgctgatgacagcttgtgatctttctgcaattacaaaaccctggcctattcaacaacggatagcagaacttgtagcaactgaattttttgatcaaggagacagagagagaaaagaactcaacatagaacccactgatctaatgaacagggagaagaaaaacaaaatcccaagtatgcaagttgggttcatagatgccatctgcttgcaactgtatgaggccctgacccacgtgtcagaggactgtttccctttgctagatggctgcagaaagaacaggcagaaatggcaggcccttgcagaacagcagtag

SEQ ID NO: 9026 - DNA, 2472 bp, Artificial Sequence
  source: /note="Description of Artificial Sequence: Synthetic polynucleotide"
atggcactgcctgtgaccgccctgctgctgccactggccctgctgctgcacgcagccaggccctatccttacgatgtgcccgactatgctgacatccagatgacacagaccacaagctccctgtccgcctctctgggcgacagagtgaccatcagctgccgggcctcccaggatatctctaagtatctgaactggtaccagcagaagcccgatggcacagtgaagctgctgatctatcacaccagccgcctgcactccggagtgccttctaggttcagcggctccggctctggcacagactacagcctgaccatctccaacctggagcaggaggatatcgccacctatttctgccagcagggcaatacactgccttacacctttggcggcggcacaaagctggagatcaccggaggaggaggcagcggaggaggaggctccggcggcggcggctctgaggtgaagctgcaggagtccggaccaggcctggtggcacctagccagtccctgtctgtgacatgtaccgtgtccggcgtgtctctgccagactacggcgtgtcttggatcaggcagccacctaggaagggcctggagtggctgggcgtgatctggggcagcgagacaacatactataattctgccctgaagagcagactgacaatcatcaaggacaacagcaagtcccaggtgttcctgaagatgaatagcctgcagacagacgataccgccatctactattgcgccaagcactactattacggcggcagctatgccatggattactggggccagggcacatccgtgaccgtgtctagcaccacaaccccagcacctcgcccaccaacaccagcaccaaccatcgcatcccagccactgtctctgaggcccgaggcatgtaggcctgcagcaggaggcgccgtgcacaccaggggcctggactttgcctgcgatatctatatctgggcaccactggcaggaacatgtggcgtgctgctgctgtccctggtcatcaccctgtattgcaagagaggccggaagaagctgctgtacatcttcaagcagcccttcatgaggcccgtgcagacaacccaggaggaggacggctgcagctgtcggttcccagaggaggaggagggaggatgtgagctgagggtgaagttttctaggagcgccgatgcaccagcatataagcagggacagaaccagctgtacaacgagctgaatctgggcaggagagaggagtacgacgtgctggataagaggaggggaagggaccccgagatgggaggcaagccaaggagaaagaacccccaggagggcctgtataatgagctgcagaaggacaagatggccgaggcctactccgagatcggcatgaagggagagcggcgcaggggcaagggacacgatggcctgtatcagggcctgtctacagccaccaaggacacctacgatgcactgcacatgcaggccctgcctccaaggtcaggtgaagaaacaagagagctacagtcgttagcggctgctgtggtgccatctgcccagacccttaaaattactgactttagcttcagtgactttgagctgtctgatctggaaacagcactgtgtacaatttggatgtttactgacctcaaccttgtgcagaacttccagatgaaacatgaggttctttgcagatggattttaagtgttaagaagaattatcggaagaatgttgcctatcataatcggagacatgcctttaatacagctcagtgcatgtttgctgctctaaaagcaggcaaaattcagaacaagctgactgacctggagatacttgcattgctgattgctgcactaagccacgatttggatcaccgtggtgtgaataactcttacatacagcgaagtgaacatccacttgcccagctttactgccattcaatcatggaacaccatcattttgaccagtgcctgatgattcttaatagtccaggcaatcagattctcagtggcctctccattgaagaatataagaccacgttgaaaataatcaagcaagctattttagctacagacctagcactgtacattaagaggcgaggagaattttttgaacttataagaaaaaatcaattcaatttggaagatcctcatcaaaaggagttgtttttggcaatgctgatgacagcttgtgatctttctgcaattacaaaaccctggcctattcaacaacggatagcagaacttgtagcaactgaattttttgatcaaggagacagagagagaaaagaactcaacatagaacccactgatctaacgaacagggagaagaaaaacaaaatcccaagtatgcaagttgggttcgtagatgccatctgcttgcaactgtatgaggccctgacccacgtgtcagaggactgtttccctttgctagatggctgcagaaagaacaggcagaaatggcaggcccttgcagaacagcagtag
